United States Patent Application Publication US 2026/0344675 A1 - sequence listing, part 2

SEQ ID NO: 3 - DNA, 694525 bp, Paenibacillus xylanexedens
  source 1..694525: mol_type = genomic DNA
cttctgcttctgcttctgcttctgcttctgcttctgcttctgcttctgcttctgctcgcaattgtgccttacactctatttccactcaacccttattttcactgatccgccctatcgcattctaccagcaacggattagtttttgttgttatttcacttctacttccatctattttctctatctctactcccgcttcaaacccttctgtcctcatctgtcccagtccgtctccctacttacgcggtgacacttcaccacgttcttcccgctcctttatctctttgcgtaccacaacttcgagcttctggcgattggcaagcaacccgggatcgttgggcaagtactcacgggctttggtgttatgcatcaatgcctgctcccagttgcccagatgagcgtaacaaagggataaacgggcatgtggcagccaggtacggcaagccataggtaccgggcgcaggcccggatcgcggctgctcacgtccaccgcctgcatataccagtagatcgccgaaactggttcctgccgctcatggaaacaggccgcaattgcgcagcagaaatcagcatgtggcagatcatactggaacgactgcagcaatgctccgagcttacggcccggctcacccagtcgttcataacattccgccagccgcgcgcaggcaatcaggcgatcctcgcggtatccgcttggctgctccagcagcttagcgtacccgcgtgccgccgccgcataacgctggcggtcataacattcgcctgcataataaaatagcaggcgaccttgggctacgccctcttcggcgatccatttgcgcagaatgcgcacgtttcgcgccgaatgatgtcccgcttcgcggcgatgcgtgacggcaatatctgccgtaatgacctcgccccgcgggaagctaagctgctcgtgcagccggccatgccagcggcacccggcatcccgcttgaccaggcgaaggcgtcggtccgtcacaagtggactcccctctgctccctcggccagcgtgtagttcaagatcacagcttccgtcttccccccggacggaagctgctgcttcaacacctccagcttcgcccgttccgcgggcagcaacacatcatccgcatccagccataggatatactcctgcgtggccttggcgaatgactcattccgcgctgcggcaaagtcttccttccattcatacgtgtagacatggtcggtatactgcgcagcgatgtccatcgtgcgatccgatgaaccggtatccacaatgacgatctcgtccgcgatgccggcaaccgagtccagacagcgcgccagcgtgcgttcctcgttcttcacaatcatgcacagactgatggtgatcacgttttgagccccttcctgtcgtacgcgtattgcgaaatgtcataacgggtttgttctttcattgaccaggtactggtactaagccactccaattttctcttcaaacttacgattaacttgtaaaccaagaatcagcgctaccactacaagaggctgctttcacactcattctcccaaatctcaaagttcaataaagaatttatttcatcttcactgtggctaacgaactgaggtgacgctatttggtgtatttcagccacctggtaaatgtaacgaatctgagacccgctattctcgcattataggcatccattcgtcgtttatcgcagctttcagatgaaataacgtcgctgagattcgttacatttctcatttctccaaaatcatcaaaataaggcgtgtgcgatttgttagaatacccctgcccttgccgctgtcgctacccttccccactctcctgacggcgaaggcgtttcacctgctccaccgcactgtccagtgccttcttgcgctgcttcattacgcggaggtgctgatgttccacctcggcaaaatggacatgatccagttccatccactccatcagttggtccaaagtcggcgacatatgcagttgtgtactcggccgtttgcgggctacgcaacatagatatttatgatgaacttccagtttcaagacttcgaaatacggtattaggcacatcgccaggcttcccgcatagaaggtctgcttgtggtcatagaacgggtgatacccatacggcacggttaccaccagcgtcccatcttcttgtaacagccgataaatctggatcaacaacgtctccggatgagcaaaatgctccagcacttctccaagcagcacagtatcaaaggcagtccttactttccattgcgtaatatccagcattcgaaaatctacattatttctaaccggccgggattctttggcaagctcagcttgcgcataccggacactttcttcttccagatcgatccctgtcacacgaaatccttcacgtgccagcagaatggacgtaatgccctgactgcacccgacatccaggatgcgtttgcctgtcgcctcacggcacatccagtggatacgcgttctcgtcgcttcatgagaatcttccgaattaatctcgccgtaatagcgttcactcactcgatcatgattggccataggtttctcccgttttcacccggtgaaccggctgacccagcaccacaatatttcccccgaggcatccggccgttgcattgcgtgtatcaaaaatcagctttgcatgatctgccatttcctgataatcgaatcccgaatgatccgtggtgatgatcaccagatcagctcctgtccacaattccggcgtagccggccgggattgaagcactgtaccgtcatccttgcggaagacaggcaccattggatcggtaaaaaccacttctgcacccgctgcgctcagcagccgataaacgtccagcgctggcgattcacgcaagtcgtcaatgtcttttttataagccatacccgccagtacaacacgtgctcctcgcacagttacaccattctgctccagcagctccgaggcatgcttcactactctctctggcatttgccgattggttgcatccgccagctggatgaattgcagctccgatccctgacggtttgcagcccaggacagatagatcggatcgattgggatacagtgcccgccgatgccgggacccgggtagaatggcatataaccaaacggcttggttgccgccgcattcagtacttcccagatgtttacccccatctgttcacaggctggggtcagctcattcacgagtgcaatattgacactgcgaaatgtattttcgaacagctttgctgtctccgctaccgttgttgaacttaccggaacaacttcgttgaggaacgagccgtagaactgtttaccataattcagacaagcgggtgtggagccgccaataatcttcggggtatttttcacaccataatgcacactgcccggatctacccgctctggagaataacagacgtagaactgttctccagctcgccagccatttgccgcttcaatcggttgttttacacgttcctccgttgtgcccggataggtcgtgctttccaatataaccaggctgccttcctgcaaatacggagtcatgccatccaccgcggccgagatatacgagatatccggttgatgctcggcagtcagcggagtgggcacacagattacaatgacatttgcctgtaccaccgctgcataatcggtgcttgccgtgaataatccagcctgcataagcgactgcacaacatcatcttctatacctatgacatacgaatgcccggcgttcagcttggctaccttggaagtatcgatgtcaatcccgtggacttgataaccggcctgtgctatctctacagccatgggtaaaccaacatagcctagaccaatgacaacagcttttagggagcggtcattaatatgttgtattagggtacgttgctgtaactcttcattaccttcgtgctggttgtgctgatgattttcttccattcctaccacctccaaacgctccgcctcccctcggtgggcgtgtctgaaaactccgaacgagttttgagatacaccctaatcgatatagccacctgcacgcaaaaaccgggcaatcgctggtttgttcatcatggcactgtccgagcgatactcggagaagttcacacgtggcagactgctgtactgatccgtcaggctcttgtccttgtgctccggcaggatgacataatactgtgcatcgtattggtacgtacgcggcgcttcaaagggcgagatcagcacttcatgtaatttctcgcctggacgtattcccgtcaccttataatcgaaggatggacgacctgcctgttccaacatgacggatgcgagttccgtcatcttgcaagctttcattttcatcacaaaagtctctccgcccacagctgcctcagccgccttaagcagtaaatgtatagcttcggtacgcgtcagaaaaaaacgggtcatgcctttgtccgtaatggtcgggcttttgccttcatcgatctgacgacggaacaaaggtacaacactgccgctggttccaagcacattgcccccgcggatgcagacaaaccgggtaccttcacttagccagttggcacggatcatcattttttcacccaaagcctttgtcatgccatatacgttaatcggatctaccgccttatcggtggacacatcgatgactttggcaacctgcatacgtatcgcagcccgaataatattccgggtaccgatcacattggtcttgaacgcttcatcaggctggtcctcgcagaccggaacatgcttcagcgcagccaaatggaagagcacacccacacctctgcatgcatcttccactgcccgataatcgcggatatccccaatgatgaatcgcagacgcggatcatggttgaactctcgcagcatcgcaatctgggcgtattcattacgtgacagaaggcgaatctcagccgggtcctgcttcagcagtacctcagtcagcttttgaccccaggagcccgttcctccagtgatcagaatcgtttgtccttgaatcatggatgaatccctccctgatcagatcatgaattcgcgtagtacctgtgccatctcatcccggcttaaccggtctttgggcggtacctttttggttgaagtattgctcgaatgcacgatgttgacataattgcgcggagcaagcagctcgtgcggcagttcaatgacattgccatgtgtacctctgcccgggagcttgacccggtatcctgctgcgtattcggctgtcttatataagtagacatagaactgtggagaacggtgaaacgctggggccatctcgttattcacactgtcccacagatatccgttctggttaatcaatgccatcgtctgctgctgtggttgaatatcgtagagctgttgaacaaaggttttatggtataaatcatccgaatccagacgggcaatatagagttgctccgaaccattggcaaacgccaaaatggcacgcacactctccatattggttccaaaacgaatattggaaggaagcggctcctgacccgccagaatctcctgcattaattccccggattccttggacaacttcaccactgtgagaaaatcctgattcgtctgcgccttcaggcaatgcaatgtgaacgtgcggaagatgctcatccgacgctccagccattcccgcgttaatcgctgtgggtccatcccgtaattgttaaagttaatctcaatcacaactttcctggacataacatgcctcctcatgaacgctgcaagttccgtttgtcggatacagactgttttcatagttttgatgccgtcttcctacgaaaaccatcttctatctatctgatcgcttacaagcgacatctcgcttgtgaatccagcactctatatcgtatgaaacgttgatagaagcggtaccgacagatgtactaactttcatataaatagatagatattcaaccaaggatggcgccctttgggtcgaacgtacatatcgttacggtagtcacaacatagaatagaacagttcaattttcaaaggaggcaacccattaaatgaattcgatctatcttgaaatggaaggtgtgcttgatcagctcgaagcggcacttctggaacaccgaccgctgtctcttgtaagagtcggtgatggcgagaatatcgtcatgtctcaagaaaccgtatggcccacggaacaggtccttcaggagcgttgggccaagaaagccaacctagggcaaaagggacttcgtcttcccaacccgaaactacgggatgaagtcgccgcttccttgcaacgtgccgatatcgtaggcattcttcctcgtggtgacagcaccattaatgctcccgattatctcaaaagacccctgacagacatggtatttgcacactttggcatcactcctccgatgacttgtcacgcctgtgttaatcgggaactggcgcagaacccgcgtttctggcagatgcttgcaggcaagcgtgtgttactcgttactcgtgagattgaggcactgcgtgtcatgctcgaacgtgatccgtataatctgaacattgtgactgccctgcccttcgacagctatgatcaaatggatgaaacgctgcactggattcagaataatcaacataccttcgatgtcgctctcttctcctgtggcgtcaacgcggttatccttgcggagcgaacagctgtacttgcaggcaaagtggccattgactttggcaaagccaacaacatcattctgaaaggccgtgccaactgatcctggacagtttcaaactttagattcgtgatttgtattgaaacgtgcagttgcttgtacggcaaaaccccccgacttcttgagccgggggtttcttgctgagcgctagtcgaaacctatcgctgcattgtcttgcgtatctggggtatgaagcgaactctaccgtcaacagaagtgatgacgaagcactctgcctgttatatttcgcctttcactactaaccggtggctgcaataccgtataacatctccggcccggttcttactgctgtggacacccccgagatgaacgaagtatacacactttccaatgctggtggtgcagacagatcctgagctgtgaacgaatggaattcggcacctccgttctgtccaatcgtaccttcagcacggtagatgatatagaaaggatcatataaaaaaccccgcacaagctccacaacaaaggtatctcccagttcccccgtaacacctactgtcccgttcaacgtaataatgggattcaccacaccctgcgtctgtagaccaatggtgccaaaagctgtcggggaatctgacagtgacaaaccgggctgtcctacggttgccgagttcatcgaagttctcatatcgagaaacacgcccatgataacacctccaatgctatgggataccctatcctatgaatctcactactcttatgattggatgtatagcagattgcatgaacctatttttatttgtcgactgttaatggtatattgaactgcataacgaaaatgaacggatcgtatgcacacaagcggtacaggctgttcagaaggagattactattcatgaataaacgcaaacgtccaaccagcaagacatcggcctcggccaaggggaaatcttatacaggttcatcttcagcacgttccggcaagtccaacttctcatctgccaaaacatcaggtgcttccgcatcacgcaatacggaggagaataagaagccaataaccgggaaatcatcgggtgcacccaagaaagctggaggcaacaaacccaaaaatgccagcgcatccaaacgaccaggcaattcctactatcgcaagcaggaaccaccacgccagtacaaagtgaccgaaccggatgaactgttgaatttcctgttgcagcatttgaaatcaggacggaacgcagtgaagtccattctgggtcgtggacaggtatccgtggatcagaaggtcgtaaccaagtttaatgaagcgctgacgccaggtcagattgtctacatccgaaaagaaggtgcagtcgctgctccatccttgacgggaattaacattttgcatgaagacgatgatatcattgtgatccgcaaggaagctggactattgtccattgccgctgacaagacagatgacctgacggcttatcgccaactgacagagcatgtgcgccgcaccaatccgctcaaccggatctttgttgtccatcgtctggatcgggatacatcgggtgtgatgatgtttgccaaaagtgaagaggtacagcagaagctgcaaaacaactggaaagaaaatgtgcaggaccgcgtatacgttgcccttgttgaaggttcagtagccaaagaagaaggcaccatctcttcctggttgaaggaaaccaaaacgctgaaaatgtattccagctctcgtccgaatgatggacaacatgccatcacacattacaaacgtctgaaatcgaaccgtgagttctccttgctggaagtgcgtctggagacagggcgtaaaaatcagattcgtgtgcatatggaagatctcggacatccgatcgccggtgacagaaaatacggcgcacgcacaagagaccttggccgtctcggacttcatgcacgtatactctcgtttatccatcccacaacggatgagttaatgtcattcgaaacggatattccgaagccattcctgtatccgttccgtgcagaaactccacccgcgaaataactgcacctctaatgtgtgcatatatagaaaattcactgatcgattgatcatgcctgaaaggaggaacggacactgaaaaacctgttgatcaccggttaccgggcacatgaattgcagatttttggacagaagcatgaaggtattccttttatcaaaaaagccatctcctcccgcctcactccccttgtcgaggatggtttggaatgggtgctgacgcctggacaatacggtgtggacctgtgggcctgcgaagtggtcattgatctgaagaagacgtacccacatctgaaactgtcgatcatcactgcctttcagaacccggaggagcaatggaaagaagacaagcaggagtattaccgttccatcctctcgggtgtggactattacggtgcgattagcaatcaaccttatatcgggccgtggcagttcactgcacgggatgacctgttgctgcgtaaaagcgacggtcttctgctcgtctatgacgaagatgccggtgaaggcagtccccgttttgtgaaggaaaaagccgtgaagaaacagcagaacgaggactatacaatcatcagtgtcacttcagaggatattcaatctgtagctgaggatgagcgcatgaacgatattgcggacttcgacgattcttcattctgaaaaaaatgtagatcatctgaagtccattcatgcatagctttcatcagaggggaatcgtattttgaatgacgtacatatgttttttttcgaggcaggttgggtataagtagtattataactgcgatgatatgtcgtatgggataaggggaactgcaaccatgacaattacgccagagcagcgcattcaactgcatggatttaacaacctgaccaagtcgctcagctttaatatgtacgatatttgttataccaaaaccaaagacgaacgcgaagcttacattgaatatattgatgaacagtataatgccgcccggttgagtaaaattctgaacaacgtctctgacatcattggggctcatgttcttaatgttgcccagcaggattacgtgcctcaaggtgcgagtgttacgatgcttgtctcagaaggcccaatcgtggagatccctgaagaatcactcgatgaatctcccggccctctgcccgataacgttgtcatgcagctggataaaagccatatcactgtgcacacctaccctgaatttcatcctagtgaaggtatcagtaccttccgtgcggacattgatgtctccacctgtggtgagatctcaccgcttaaggcactgaattatctgatccactcctttgatacggacattatgacgatggattacagggtgcgtggttttacgcgggatacgagcggacgcaagctgttcattgaccatgagatcggctcgattcagaattatattccggatgagatcaagagcagctttgacatgattgacgtgaacgtctatcaggagaatatttttcacaccaaatgtaaactgagggaatttgatctcgacaattatctgtttgggtacaccaaggataagctcagcaagaaggaacaacaggagattacagaatggctgaagctggagatggacgagatctattacggcaaaaatattaatcgtccctcttaaagaggttgttcaacgctgatccataagggcaaggtctaagacaagatttcatgaaggcagggttcttcttatcgggggacctccggcatgtgcttgtctttttctttgttatgttgacagtgtgcaactttatttcttattatagaagtaactgtacaatctacagtgaaggagactgagcccgtgatcgaaacgaatacgacaagacgtaacgaatcactgttacaagcgcttactgcacagcacaatgccatcaccaacaacatagccaatgcagacacgcccaactacaaaaagaaaacggtagagtttcaggaagagctgagacgtatcgttgaaaatggcaaaacagatcagctcgccatgaagcggactcatgacaaacactttcctatcagtgatcccaattcttccatcgtacaataccgaattgtcgagaacaacgaaacagccatgaacaataacaacaataacgttgacattgacaaggaaatggcgaatctttcggagaatcagctcatgtataactacatggttgatcgggtcagtggacattacaaaaaaatgaagaatttattgaatgatctgaaataatgaatgtaaaagcagcccgaaacggctgcttttttttgttgtttttccctgagtgtagctcgtttggtgccatttttcggtatcctctcctgttcgtagtataatggggagaaacgattgatttcatatcgaacaaaagaggtgcaacatgtctccacgtcatttaaatggttttctaggttccaaagtcagattagcggccccatgcccggaagattgcatgcgtctctcccgcttcacagacgattatgaatatttgcgcaacatggatactgatatcgcgatccctttaacgccggatgaaacgggttcttcgtctgtccgccgcgacaacggatttgaatttgcattgcgtacactggagggtaaccgattcattggattcacagccctataccgaattgaatggaacaatcgctccgctcgtctggccattggcatcggcgaagaaaatgatcggggtaaaggttacggcagtgatgcccttgctctgattcttcgatatggattccacgaattgaacctgaaccggattgcgctggaagtcatcgagtacaatgaagccgcgagacgtgcatacctaaaagccggattccgggaagagggtcgccagcgttcagcagttttgcgggatggcatgcattatgacctgatctcgatgagtatccttgccgaagaatggtccgcacaggctgggcttcccttgtcattccagtctactcgtactcctgaatctggggatatggtagcgggtggcttttcacaacctaatgggaacgaacaagctgcgctgtcaatgtcggaattaagttctgttccaaaaggtgaatctgaaatttcacctcgcatcggcgtaggtgcggtcatcctcaatgaacggggcgaagtgcttctcgcctggcggaatcgccagcccgagcagcacacctggagtattcccggcgggaaagtcgatccctatgaatcactcgaaactgccgtcatccgtgaaatcaaggaggaagtgaatctggatatcgccattgacagtctgctctgcacggcggagacgatccagccacaacagaaggaacattggatatccgtgctctattccaccaaggtgattggcggtcatgctcgtaatctggaagaaggcgaagccatcggtgagatcggctggttccctttgaatgatttgccctctccactcgcctgctttgcggtacctgggctggaagctgtgaagaagctgtataatgaatccctgtaaattctaatatctcatcagatggaggtattccttatgaatcatgcagaacaaattaatcaactatttcaggctgcacagtctggagatgtggccaacctgcacttattgctcgcttctcacccggaactcaccaatattgaaaatcaggatgggttaactccgctgggatatgcctctcattatggacaagcagaagtagttcgtcttcttctggagcatggagcagatgttaacaacctttctcattccaagatttcctttatcccgtccaatactgcactacatgccgcgcttgcgggagaacgttcaccagaagttatccaacttttgctcgaacatggggcatccacgggtattctggacagcgatggacaatatgcgttgcactccgcagcatttcatacggatcagatcgaacttatcgagatgttacttcagcatggagctgatccaaacgtgctgaactcagcgggccagaccgcactggatatttcacttgaacgtggtaacacgtctacagcttcatatctacgagcagccattacagcgcatcagcaataatgattggataacgtaagcaataccgcgaataaccgtcaggactctttttggagtacaaagagaaggtctgacggttatttgttgtccgattacatacctctatcggtgagaggctatataagttgagctaagaatatttacgcttgccactccgatgacagaacaaccttccgatcgctgttatccccagattttttaattcacttttacaaaggtgaaaatctggcgataaaggcgaagtgtatgcttccgaaggagctttcttacagaaagcttttagctccgcttcttcacgttatttctgtcctctacgttctcatgtaaatacttcgttcaacttctatagaaatcccgatacattatatttttttagaaaataagaaccgtttggagccttacgcggtctaatactcaacatatccatgaaaggaggagccatgtgaccccttctcagctcaccatcgccgcacaaaaaggggatgccgaggcttttgcagccttaatggaattacatcagagccaactgtaccgtatcgcctatgcctacctgcataacgaaggtgatgcgctcgaagcgattcaggaatcaacgtttagggccttccataaactcaaaaaattaaaagagccctcctactttggcacttggctcatccgcattctgctcaactactgtgcggacgaacgcaaacgaaaaagtcggttcagtcccgtcaccgagattcatgaatccagcagttgggatcgtcctgcggaccccgatcttgctgctgccgtatccactcttgaccgggattgcaaacagattattattctgagttatttcgaaggtttctccttaactgaagttgccgatattctcgaaatcccgaccggaaccgtaaaatcccgattacatcgggcactcggacagctccgtgatcaacttgaaacgaaaggagatatatcctcatgacggatgaacaaaacccatttgacacattggaagaacggctgaatgctcgcaagacggaatatgaaaccatgcctgtaccgaatgctgcctatcaggctgtgcagtccggaatccgccaggctgcccataagcgaaagtcccggctgcgctggtatatgagctcaatctcggcagctgccctcatcctgttgtttaccggttgtatccgcgtctctcccgcctttgcgtcctttgtggagcaattgcctggcatggaaggcattgtgagcatgattcgccaggacaaaggattaatgatggcgatcgatcagtctctcttgcagaagatcggtgtcaccgacgagcatgatggtacttccttgaccgttgatggcattatcacagacgagtcacgtatggttattttttacacgatgaaaggcatgaaagatcccgagaaattcaactatgatattgatctgctcgatgagaacggtaatgatcttccagttgcgtttactcacgcttatccaacaccttcaccagacgagaatgtgaatgagaatatgatagacgtgatcttcacggatggaacctctcctcctgaagagctgagcgtcgtgtttaaggccagagatacaacgcgtgcagaaaagtggaaaataacgttcccggtagacaagaatcttaccaaaggcatgaaaaaggtcattcctgtgaatcagacgttaacagtggatggacagcgtattgatgtgaaacaggctactatgtatccaacacgtcttgtgcttgatgtgaattttgatcctaaaaataccaagaaggtatttggcctcagcgatcttcaactggttgatgagcaaggccgcgcgtggagaacagatacctcaaccggtgaggatgaacgttccatttacttcgaaagcatgtacttctccataccgaaaaagctgacgttacagggatctggcttctccggattggataaagatgagttggatcttacccttgatctgaagtcacaccggattacaggtggaccacctggattgaagatggtaggcagcaaggtcgaaggcaaagatctaattattgacttctccgttgctggcaggatggacggtgggttcgttctaactttcaggaaagttacagacagtacagggaagtcatatgaagtccctggctccagttggagtagtggagagggaacggatgacagtcatacgattgtttcttctactatcaaaaatggagccaaattaaaaggggaagtgaaaatgaacatctccacctatccgatgaaagtaaagtctcccttctcattggacatccctgttaatccttaattttctaccagtaggctgtgattatcgcaaatattctatataatggaaacattcattattacgagcaatgatgttcatagggaaggtgtgtttagatatgaatcaacgttccatccgttatccgcagccactcgctccgggaaataccatcggtgtggcagccccctccagcggtgtaggcgaatccctataccattatcttgaggagagcaaacgtaatatggagcgccttggttttgacgtgctggaaagcccatcgctccgccacaatatcaaatgtgtgagtgcctccaaagaggaacgcgccgaagagatgaatgagtttttccgcaatccaaatattcaagccattatccctccatggggcggggaatttctgatggatatcctccccctgctggattgggaagctttgaaaacattaccgcccaaatgggtcatgggatattcggatatcagtacgttcctgttagcctataccctgatcaccggaacagcatcagcacatggcaccaactatgttgatctaagatcaaacgccctcgatcccgtgactgcgcgctggattgatgtgttacagaccaaatacggcggacagatcacacaatcgtcttctacacattatcaatcggcatggaaaccggaatctcctggatttaacctggatacaccttcgcaatggaaacagctcggccactcggaagatgcagataccgttgtgtcgttctccggtcggctgatcggtggctgtatggatacgatcactagtctgattggtacgccgtatgcacccgtccaatcgtatttggatcagtactgtgtagacgaaggaacgatctggtatctggagagctgtgaaatgaatgcgggcgatatctaccgtcatctgtggcagatgaaacaggctggctggtttgctggtgtgaaaggtttcatgtttggccgacctgcgggttattccgatacagccgatttcaattttaccgatgccctatcctctgcacttggggatctggatgtccctgtactgtacgatgtggatctcggccatgttccaccccagctcacctttgtgaatggagcattaggcaaagtcgcttatgaaaatggacgcgggatccttgagatggcgtttgtgtaatcaccttttataggcagatgcataccttgaagtaagaacttattttgaggaagggttgtgcatcatgtctgaatccacatccacgccatccacacgtgtcgtgtatcaagccaatcaaccgatgcttcaatccgtgcaaagtgtgcggaatatgcttcatcatacagcccggcagcatgtaggcaagaaggtacaagtccagaatatcgatgggcaagtgtgggaaggtgtcatcatcagtgcagaccggggaattttgtatctccaggttaccccgatgcatggatatcctgaaccgcgcgccttgtttggaccaacgattttgccgcttgtgctgtatgaattgttggttatcacactgttgatgtaggtattgcgcctttatatccgaacctgttccaagatgcttcgctcctgagatcttcaagtcttgggaacgaggcttttttatcgtcttggcgatggtgcggtatgattccttgcgagcgtgtgaaatatgatacaatggtgtcgcaccaccccatatctcatatgaaacggagcttgatccggttggaatacatacgtcatgattcatcacccgtatcacaagccgagacgggtatgattggcagcaatcctactgaacaatcacgcgtgattgcaatctgtctgctcgcaggcaaaatcatgctgcaaagcggtggtgaaacctaccgtgtggaagatacgatgaaacgtatggcagctgcgctgggcttaccccattcgcacagttacgttgttccgacaggcatcttcttctctgttgatgcaaccgaacctgccaagctcattcgtatctccgagcgtacgacggatctggacaaggtgtccgaggtaaatgcggtctcccgtcgcatcggacaaggtgagctatccgctcaggaagcccatgatctgttgatacagatcgaaggaaagccctcctcctattcaacggctgtgcagcttacggccgcagcgttatccagtggttgttttaccattatgtttggcgggggctggagcgactttcttccggcgttaatctgcgggggcataggttatgcagccgttattgcctttcacaggttggtgcgggtcaaattctttgccgagcttacggcatcctttgttattggcttactcgcttttctcctgatctatatgggagtgggtcatgaacgggacaaaatcatcattggttcggttatgccgctggttccggggctgctgattaccaatgctgtacgcgacctgatggccggacatctcgtctccggattatccaagggagccgaggcatttctgactgcttttgctataggtacaggcattgcagttgtattttcactttttatgtaagacggaggaatgcaggatatgctccattttattgaacaagccttgaccagttttgtcgcctcagccgcgtttgggatcatcttcaacgcaccacggcgcatgctgctccacggtggatttgtcggcatgatcggctggattatctatatcgtgcttgaatatgcagcggatgcggttcctgctacacttgcagcgaccatagccgtaggtgtcatcagccaggtattctctcgcatgtttcgcgcacccgtcatcatcttcagcgtcgcaggcatcattcctctcgttcctggtggactggcgtataatgcaatgcgaagttttgtgcaaaatgactacagtgccgctatggagatggccgccaaggcactcatgttatccggcgctattgccgtaggccttgtgttatccgaggtattgaaccagatgatacgccgaattcccgcctcactgcggacaaaatcatcatcgaaatgattattcttttcacatattcagcacacgtaaggcccgttagcatacaggataaaatcttgtataacaacgggccttacatatcgctttttatagagcactatagtgcagtgagacaatcaaagaagtctatttacttcacaaacgtatttttcacacgtaccgactttaggaaatatggaatgaagatacagcacgtcagaatggatcgtacgatcagctgaaaagccggagttgcatcaagcacatgctgttctcttgggatttcattgcgcgcaatcagaatccacgtcacgatgcttatgatcacattcatcaggtacatcaccatcatcataagtggaaactgtctcttccgtttatataaaagaatgagattcacgataacgatcatcaatagaatggtactgcttatgaaaccaaaccacaggagtggacggatcatctccgtgtaaatctgaggatcgacaccacggtctacttcccatctggcagggtccatgatgacattcacctgcgatacatccgaaatgagaaacaccaacgcaaaccaaagactgatctggattaaaataagccatccgcccaatccggagataccaggcagctctccatccgagttcatgtgtctattgttcatttcatcctcctcataccgaatattagacttctccagtaataaccgattgtgcctaagtttcacttcgctgcctggccttaaatataatcttctgatccgggtataccttagcataatctaatctgttggctatgcttttccttccccaattccttacctgttcaaagtataccaccgagggatgaaactgcgaaaatcatcgtgatcttcacggacacgctcgatcttggccatcatctcaagcgtctcttcaggcttcacctgctgaatccacaccacagaagacaccagcgccatagccgtatacagtgaatacagtctccagaataactcatccggttcattgccatcgaaatagccctgaatttgacctatggaatatggaatactgatctccgaagcaaacaaacccagcttcaaaaattcatgaatgggatcaccttgatcataacgattaaaatcaatcactcctgcgagtttatcctgcttaacgacaagattgctcgggtgaaagtcatcatgctgaaatccatctggacgatttttcatccaaccgagatggtctgcaataaacgttagaataacatgatcctctttcatcacaatagggcactgtctatagcgctccacgtaacgttgatgcttggtgctcttgcgtatgtaccatgattcgatctgttcctccatcggcaactggtgaatcagctgtagctgcgctcctgcttccaaaccaaccgcccactgctgctgttcattcagctgaggcagtctctcggaagcatcttcgccttcaatgtagctaaaaatcatataaccatgcttctcatccaatctacctgtgcccaacgttgctggacacagtacacctaattgttgcatgctttgcaaatattgatattccctttgcttcatccattcctcagcaatatcatacaccctcaccagcacatggccttgaccagggacaaacattttgaatttagtatctgctgaataacccctcataacaggttcaatccgcgtggcctgaccaagttcaggaatctgttttaacctgtcaatcaacgtattgtccatcgatgcattccatgtatcgtgttgttccacgtcccgaatcctccgttatttcacgtatggcgtgtagtatcgtcggtctattcccactttaacccatgatatttcctataacatgcttatatgtattctatccgtttctatttaaaaagtactgattcgggttctttgcccgtcagggtcagcatcgtatacaattgtcccctgtgatgatacacatgtcccataatctcaagcagccactccagccgactataggaagctccccagtacgaatccgtcacatgtaataactcttccgtgttaaactgcctgtaccgttggtatagatacatctggttatcaatcaaagcctgcttgatctcaccgagcgaatgcacctgattctctgcatagaattgagccatctcttcctccgatgcaccttcggaaatataaacatccgctcggcagatcacagacagatgagctagtagttctccaacaggccgtttaccttcaattggagtcaaagccaaatcttcttccgacaactgatcacatatatcaattaacgatgttacggctacgtcaatatgtttaaacgcagattgaatcaacagatacacttcctttttatcccattatacagaacatatgatcggttatcaaccaagatatccctccttaatatataccccaaatctatataaattgaacaaaacatttacacaaaacggagaagacagaaaggacctgaagaagcggagctaaaagctttctgcaagaaagctacttcgaaagcatacacttcgcctacaagctttctgaaagaaagctgcatcggaagcatacgctatccccggatttcccctttataagaggactcaaaaaaatctggggataacagcgatcggaaggttgttctgtcatcggagtgtgcagtgtaaatattctttagttcaatttatatatcaatctacgaacaaaaaaagtccttcctccttcatatagacgggattcaggacattttgttgcctatttgttttcaaatctttgttcaacttgagtataacgaacaatacgtttgctcgaatcgtccagcctccaagtcagacttgcgaatgaaaaattgcagttccccgcaatcccaccattggaaaccaatagcatcatgcgtatctatcttcaacagcagcagcgtatcggatagttcctgccatgtccgatcctcatcaccgccgtaatgcttggtcagcttcttctcacactcctgctcattataatcgtactcttctcccagtgcgatctgtaacaaggcacgatgctcggcatccggatgctgcccgtcaggatatccaaacatcccgccccaattcagcgtacttggatgattccaactcgactcgaattcaaggtagcggtcatacagacttacttccgattcggtctcatcggtctcaagccgaagcggcgagagctcattcagcgcgttggcgtcgatatatgcatatgtaggaaactcaagatttggcagcacagtcaccgaatgtgcaacaaacggtgctccatccagcgcggtatcaccttcaggttctcgccttatcaggttatgagaacttggctcaaaaatcacacgatgttcaatgggacaagcagattcatccgtgccaatgaaaaagtataacattccacgttcaggcaaagtcccgcgcccatcattcggcgtatacggcgacaaatccaccaggttcagttgggccaggaaagtcattggaactccttcttgtgttacgggccattccatgcgacttggcaaatccggatgtccacccacacgtgagtttcctgttctgcgatattcgtccagtgtggatacatcgaggcgaattccccagcggcttgaggacaacagcagatcggcagcaactcccaaaccatattcctcaagtgttttacgggcttttctggtcagacgttcacattgttctggcttaatcatatagatcctccccttttgacaatacacctatgctgagacatattcaggttcacacctgtatattcttccgcccggacgtctttccctgcttctagcaaaaaaagagactgacactccttgtcagtctacttccttatcctatattccatttaacgatttggatcagaagacttttcctggtaagcacgcatatgctcctcaccgtccaggaattcatgggcctgatgggctgccatcacaccatgataactgatatccagacccagatcttcctcttcttctgtcgaacgtacaggcacaatttttccaatcaactttaacccgatccaggtcatggcgaatccccagatgaccagggctgtaaggccaagtgcctgaacacccagcaacctccagccgccgcccatgaataatccaccatccgtggcaaacagacctacagcaatcgtgccccacattccggatgcagcatgcaccgggaaagcaccaactggatcatcaatctgccgacggtccagccagttggtggcagccatcatcaataagccggatactgccccaatgaatatcgctgctacatcaccaacaaaagcacagcctgccgtaataccgaccagtcccgcaagcgaaccgttaatgaccgagggtgcatctgaacgattgaagcggaataacgtatacagcaacgtaaccgcaccacccgaagccgcagataacatcgtgacaatcgcaatgtgaccaattcttacatccgtcgcgctgagtgtactaccagcattgaagccaaaccagccgaaccataacagaaatgcacctacagatgccagtggcagattgctcgggagtgcaatggcacttacgccaagtggtgtgtacttccctttacgtggaccaatgataatcgcagcagccagtgccgagaatccgccgagcgcatggatgacagcagaaccggcaaagtcctgcatccccagctgactaagccagccgccgccccatgcccagtgtccaccaattggatagatgatcgccgtcatcaatatgatatacaacagataggcacggaagttgatgcgctcggctaccgctcctgaaacgatggaaataaccgcaatggtaaaggcagcctggaacaaccagaatgtctccagagataccggtacgtccaggtgagacaaatccccattcaggaaaaatcccgttactcccgcaaaaccgccaacgtccgaaccatacatcagtccaaaaccgatcgcatagaacagtaacgtcccaatcgtaatgtcagcaaaaaccttcataataatgttcacactatttttataacgcacaaagccagcctcgagcagggcgaatccaccctccatcaataaaatcatcgctgcactcagtacgacccagaccgtatcaatcccggtgcttaacgtctccaaagtcatacttgtacatcctccgtttcactaagctgtctgagctcacggattgtatcgggcgcaagctcaatctcgtcccgctcaatgctgtccggatgcttaattcgttctgcgatctgatccaattcacggatgcgtctgcgaatctgttccatcttgcgaaaacgttccttcacctgcaccatatactccaccgcctgatgatgggatgctggacgtcccgcgaaccatttgcgtacgggcgacaacgattgataagcaacctcttccgctcgacgcttctgttcgaactgttcgatcttctgcttgagcgtttggatctcattttcttttttgaccttcagccgttcgataaggtacaataaatcggacgatgatatttgcaatgctgtatggtgatacacctcgtcgattactaacatatcatgtcaggactccttacatatcaagttacttgtaccgattatagtttgccggggtctgcccgtcaatctttttttggacttggaatggatttaaatgaaccgttcatggagaacggctttttttatttgccacgaattacatctaacaaaggataatgttgcccaggttcgcattcactctttccattctcaatgcttatagaataagcatccacatttggggtaatgaacatacacagactacccgcatcatagaacctatatataaggagaggattgtacgatgtttactcgtaatgacgatatacgcaaccaaatctgggaagcagtctctggactcgaagaagaacaattgaaccgaaaaccttcaccccaacaatggagtattatgcaagtactacgacatctgaatctgatggaaaatgttattggaaaacaagcccgcctggccctcgagaaggaacagacggtgtctgtggacaaaaaaccatatgaattatcgttggaccgcagccgctccgtcgaggcaccaccccatcttcagcctccagcagcgcctgaagcacttgcagacgtacgcagtgatctggacgaatctcaccaagcgttaaacaactttgcattggatcatgatcctgacctgctgcgcagcaagtcctttcctcatcccgtatttggtgagatggatcttacccaatggattgactttacaagttatcatgaggaacgtcatctgggacagatccaagagattaaacagcagcttggcgtgtaaacacaacctcctttttcacatagcaaagaatatacatgtaagacaaaaaaacctccaatcctattaatttaggttggaggttttcagtgttcttatgttacgaataagaacgacacttatatttttttgcccaaaatcgccagatctctattcacaccatccaacacggccacttcgggataataaccccattgttcaaaaccatgcttgcgcaataaccccagactcggttcgttatgcccgaagacaaatccaagaatggtcttaattccaagtgcaggacatgccgcaaataccgtttcgagcaaacgtccaccagccccaattccgcggcattgctgatccacgtatacactgacttccaccgttccattatacgcagggcgtccatagaacgagctgagacttgcccaagctaccacattacctgcctgcttcatcacccaaagcggacgatgatccggtgaatggtcctcaaaccacggaatacgctgctccaccgtcaccggctccaaatccgctgttgccatacggccctcaatagtggaattatatatttccacaatcctcggcaagtcctccaggcgcgcatattcaatctgcacatctaccagtttcatcgctattcctccatcattccagatcgttctattatcatagaggatattataatggaaaatagaagccttcgtcatccctaacattctgacagagaattactcaatcattactccgccagtccctatattgtgttcccacgagtgaactgctgactctggtctgcccaacgaatgttaattgagcgagatgtgaacagatccgggccgtccgatacctggaaatgcagatgagcttcactggagttccccgaattaccaagctcaccgatagggtctccctgcttgagcttatctccttttttgaccgaaacactgcctttcttgatgtgtcctgtgatgctgtattcactgttgccatggtcgattaccacatagttaccggccggttcttccggattcatgacacccggcacattgtccggtatatcgttcttgatatcgacgacagtaccatcggcagctgcataaagcggttcaccaaaagcataatagttttcgtttgacgttgcatcaccttgataactggattgctctttggtccgaacgatatccagtgcataacgctgcgtttcgtgctcataatgatagttcgacaaagcatcattgcctccccagaatacgtaccattcccccttcatcggcaattgaaattccgttttggtgaatttggcatccgtgtcctcatgagcttgcagcggttggatcgagagaccttcaatttgattttcttcggaaaaataggctcgaattcctttcgtcccagtctgatccttccaggccacctcaaatatttgattcattttggcgtctaccacttgctcccatgattcaacaccctccaaaaaaggatcggccgtcgttttgaactgttcaagcgttaacgtccccttcaattcgggggagaattgattatagattgcatcctttgaaccgttcatcagcgtatctatgaaattgtccggtgtaaccactgcgctcacctctgaacttgagttctgctcctgattggagttctcgctcgcttcattattggacgcctgttctgctgactgctgctctgcctggtcggaagtaatggagttactgttgccgcaagcagacagtattacgcaagctccaagggtaatcgcaagcaccttccagccccttttattctgtaatttcgaatgtgtatgttgctctgatttcacatgaccttctctgttcattttcaacatcccttctgctaatcgttatactttccagttaagtgtacagaatgagtcttatccttcgtctaaccccaacttaccagtagctaaactcgtcttgccttctaacgctgcataattaagattccgttaagatagctcgtacgctatacagccttcttggatggtatgattagcaatacacacaacggaaggatcaggaggtcatttttaaactatggataacgtatcattactgcttgtggatgatgaacaggctattctgcatatgctcaaaaccgttctgctcaaagagcagtttctcgatattgataccgttacaacaggcgaagctgccatggaggcatgcaacaacaagacgtatcattgcatcgtgctcgacatcatgcttcctggcaaaagtggactggaaatctgcccttttctacggcaggtcaccgatgcgcccatcctgtttctaacggccaaaacaaccgattatgacaaattaaccggattcgccgttggtggtgacgattatgtcgccaaaccctttaatccgctggaagtcgttgctcgaattaaatcattactgaagcgttatttaccatctaaaagcgcagcgatctcggatcatgtcccatctaacgtaaatacgtcatctcccagcacatcggaaggcgtgtacgactttggacggtttcaagtgctggagtgggctggtgaacttcgtgttgaaggtaagtccgtatcctgcccggcacttgtgttccaactgttactctttttctgcaaacatcccaatcgaatcttcaccaaatcagatctatatgagcgagtatggggctctgaagccattagtgatgacaataccgtgatggttcatattcaccgcattcgggagcgcattgaagccgatccttccaatccggtgtttctcgtcaacgtccggggtctgggttacaaattgattcagccggaacatgtgtcacgatcatgagtattcggcgcaggttaatgacccggtttatcgggatgcttgccggtgcagtcgttcttatcatcctgcttggttctgtagcgacttactgggtcgtgcaaaaggtaaatgaagtgaatctggtagatgattttgctgccaacggtctggaccaattaattaatacagcagagatcatgccggatgatacgatccgatatgaccccgaattgctaaagcaagtggataaatatcaaggctggctccaagttttggatgaacaaggttacgccattgatgaataccacacacccgccgatgttcctactcactataaaccgggggaattgattgcatactgggaaggccagaagccttttccttatcagatcgtcatgctgatccgggagaaaaacgggaagaacttcaccttgttatatggcgagagtaacccggccaagtccttaatgaataacattcgttcagaccttgctttcaccaacgggaagcttaatcttcagcccgaccaacaggaggccctccgtgccgccaatgcttatcttcaagtattggacgcatcaggaagcgaactctcctcctataacaaaccagccatgggcgtaccaagcgaatacaccattcaggaactggttctgcaaattcgctatccgagtcgatcaggtatgtctgttgcaacgtggtacgacgaacagaatgaaaccacctggctgattagcatacctggtgatccattgacgaccggaactcaaaacccctacagttttattctggaaccggcattggttgtattgatcgtgtctatcatcatgctgctcattttgcttgccttctggtatgccaaccgatttggctcacccatgctgcatatgctccaatggttacaacgtctggagcgaggacattacgaggaacctgccggagcctctggagtgcctcgcagtcagcgtcgtaacggaaaatggaaacgaaaatacaacgtgtatgctgaagtgcttcgctccatgcaggccctgtcacacactttgaagcaagatgaagaacttcggaaacagaccgattctctgcgggaggagtggatcgctggcataacacatgacctgaagacacccctctcctccattcagggatatgctcatatgcttgaggcggataaatatagctggaccgcggaggaagtcagggaattcgcaggcataatgctcgataagtccatgtacatggacaggcttgttaacgaccttgccatgacctatcgattacgcagtggaggatatcaacctgtggtggaagagactgacgtaaatacgttgctccgtgatctgatccagcgcgctgaacggaatccggcatatggagaaggtcgcatcctatttcaaccttccgaagtgcctgtgtatggacttgtccatattccgtcgtttgaacgaattgtggataatctgaccgccaatgcccttcttcataatccgcccgagtccatcctggttgtcagtgtgcattctggtgaacacgctgatgagttcagcattcagtttgccgataatggaagaggcatggactccgagacggtatggaagttatttgaacgatactatcgcggtacagatacaggtacatcggacgttggatcagggctgggcatggcggtaaccaaaggtttgatcgaagccatgaatggtcgtattgaggtacagtccacgcctggtgaaggaacgatcattcgcttaatatgggatgggccgtccgaaaccaattaaaatgttccgcttgacctttccattttcagtctatataatcgacactcaataacacctgttccaatatattaatattgaatgcaacacatttcagaataatttgaatgagttgatctaacatatttggcgatgaccagagacatgatttcgtttgcgtgctgcccagagagagaggggattggtgaaaccttcttcagcgaacggaccggaattacccctctgcagccgtgacctcgaacctcagcatttcgaacttccctcggatgtttggcttgctgccagtagagttcaccgcctgatccccgataacggattccaatgagggttatgatgttttctgttccggcggctgggcgagagcagggtgcaccataaccaaaattagggtggaaccacgagccaagcgcactcgtcccttttccgggacgggtgttttttgcgctttcattttaagaaatggagagtggttcacatgagcaaacaagaaaacagtaactcagtaagcaacaaatcaggtaacgaaataaacaaccaagcaaatgatcttcaaccatccagtcattccattgaggtccatctgcaaggtggcgcgatacgttcttacgaagcaggcatcactgtaggtgcggttgcctcatctatcagcacaagtcttgggaaacaggctatcggcggtattgtagatggtcaaaatgtcgatctcgattgggtgctccagcaagattgcgaacttgttatcgttactttagaaagtgcggaaggtctgtatcgttatcgtcacagcgcagcacatgtgctcgcacaggcactcaaacgcatttacggtgcagaacaagtaaaactgggtatcggcccagtcattgaagatggattctattacgatgttgatctggagcatgccttgtccatcagtgatctggctgccatcgagcgggaaatgaacaaaatcattcaggaaaatcataagatcagtcgccgggtcgttaaccgggaggaagccctccgtatcttcggagaaatccaggacccttacaagcttgaactcattcgggatttgccagaggacgccgagctttcgatctatgatcaaggagagttcttcgatctgtgtcgcggtccccaccttccatccactggtcggatcaaagcgttcaagctgttgaatgtagctggtgcgtactggcggggtaactcggataataagatgctacaacgtatctacggcactgctttcccgaacaaagcccaactggatgaacatctgcacatgctcgaagaagcgaagaaacgagatcaccgtaaacttggcaaagagcttgaactgttcatgttctccgaagaagctcccggcatgcccttttatctgcccaaaggtatgactgttcgcactgaactggagcaattctcccgtgagttgcaattgcaggaagggtatcaggaagttcggactcctctcatgatgaacaaccgactgtgggagcaatccggccattgggagcattacaaggacaacatgtatttctcggaagtggacgatgccacttttgcactgaaaccgatgaactgtcctgggcacatgctgatcttcaaaaacacacttcattcctatcgtgaattaccgattcgcatgatggaatttggtcaggttcaccgtcatgaattctcaggtgccctgaacggcatgatgcgtgtgcggacattctgccaggatgatgcccatctctacgtcatgccagagcagatcgaggacgagattaatcaggcgatctcactgatcggacgtatgtacgatatctttggattcgaatataagattgaattgtccactcgtccagaagattccatgggatctgaggaactgtgggatcaggcggaacgcgcattgcaaaatgttctggatcgtcggggcgtggagtatcgcattaacgaaggggacggtgccttttatggcccgaaaattgactttcatatccttgatgcgctgaagcgaagctggcagtgcggaacaatccagcttgattttcaaatgccggagaagttcgacctcacttacattggcgaagatagtctgaaacaccgtcctgtcgtgatccatcgtgccatctatggttccatcgatcgtttcatcggcatcctgactgaacactatgcaggagcgttcccactctggctcgcacctgtacaagtgaagctcctacctgtgtcagatcattatgcagactatgcactccaagtacagagccaactccgtgctgcgggcattcgggtagaaacagatctgcgcagcgagaagctcgggtacaaaatccgtgaatcccagatggaaaaagtgccttattcgctcgtgcttggtgagaatgagaaaaatgcctcatccgcctctgtccgtgcatacggtcagggagatcaaggcatccaacgtattgaagctgttattgaaatgatccaacaagctgtgaaggcaaaagtataaaatatgtaacgactctattcatgagtcactcatcagcttgtgctgaattacaacttctcgtcatctcttagccccacctgttcttcgctccacgtccagaaacgctcagctgaagcatcgtcaacggcatgtgccttcagctgctgctctttctgttgatagtagtaacgcccggtgatgccgacgacttcagggcttgtggccagataaacagccgttcgcgccccttcttcaggggacagaaagaatggaagtttacctgcaaaagccataatgcgtgtgccaaatccggtattacgatctacgccaatactcgttcccaccgcaccagggtgtagacagtttaccgtgacagacgtacctgacagtttgcgggccagtgcacgagtgaacagcacgttcgccaatttggattgagcataacttttgatcggattataacctttgtgcagatgtggatcttcgaagtggatttttccggccttgtacgcacctgacgaaacgttcacaacccgtccctgcttcgcggctttcagtggctctatcaaaagtaaggtcagcaggaaatgccccagatggttaataccgatactttgttcgaacccgtctgaggtttccttccgcttaaccatcactacccccgcattattaaccagaacatcaaggtgatcatgacgctcgcggaatgtgccggcaaactggcgtatactttcgagtgaacccaggtcacacagcatcaattcaatcgcagaagaaccggactgacgcacagcttcctgaagagcctcctgtccgcgcttctcactgcggcatgccataattacgcgatatccttgccttgcaagttcaatggtggttgccaaccccatacctgagttagctcctgttacaattgctgtctgattggacatgaggtacttcccttctgaacctgaggttccgaaattagagcgcgacgacggacaatatgagataatgataggatcacatctcggtttccatgggaggacaagtatgctgaccaaagaagattttaaaaaagttaaaaaacaagccaaacttgaaatcgcactactcgaacaggaatatcaggaaatcttgcagaacgtcgactctacgctgtatgaaaaatacggtattttggacaaagaagaaacatgtgagctcacccgaaaacgcaaaaaccgaagatatgcttcactggtcatcgaactatgcgccattattgaacaaatgttacatcaactgtacaaagacgtatatcagaaaaagtttaattcgacccagctgatgaaaactcctgcataccgtgcccgctccaatatggagattattcaggccgaactcagtaaagagttcattgctctggaatccgaaaaagaacacttcgctgaagcgcttagtctggtgtttcagacgagaaacaaacttgttcatgataacttctcgtttgtctccatcgttaaggacggcagtaatgaagaagaaacgttcggagcgctgctccatacggtaaaaaaatatagaaaacacttgaaatataatcgccctgaataacaacaatcatcgcttaaaaatataaggaggtgtaccggactacggtccggataaccatgagccatccaacaacttcgattactgtgctaaatcttcagattcctacaccttccgggaacagccccatattccccgtcatgcttcgtgatgtagatggcgttaccctggtggatacaggcatgattggacaatttgccgaacttcaatccgtattggaacaagagggcgtacagttctcggacgtcaaacgtgtgattattactcatcaggacatcgatcatatcggtaacctgggcgctcttctggatgctattcccgatctggaaatctgggcacatgccgatgagattccatatctaaccggtgagaagcctttgatcaaattcacacctgaacgtcgtgctctgctgcccgcgcccgttttggcactggcagatcaactgctcttgcagttgcctgaagtgaacattagcagaacgctggcagacggggacatattaccccttcaaggtggtacacaggtcattcatacaccgggacatacaccaggtcatatctgcctgtatttcggggagcaacagttcctgctcgctgccgatgaacttcgtgtggtcgatgatgaactggttggccctgcaccacaagcgacaccggacatgcctgaagcgctgcgaagcctgaagaaactgaccgaccttaagctcaataagattctctgttatcacggtggagagtacatgaatgatccggctcagcgtattgccacacttgcggagagcgcagagtaagtaaagaacgcggacttgtgagtttctttggaatgacacaagcatcctgttaacgttgtttctcttcgtgcggcattgtgcgttgtagctcattcaagattaggatgacacatacattacaatcaaggagctgtcccataagtcatgaatttgacggggacagctcctttaattaaccacgcacttctactactctactgcactggtgttgttttgtaacgaatctcagacaccctatacgaagtattttgagtatcaagattttctaacgaactccagataccttagttactcatttcgttggtttttctgcaggtttcgagtgaattttggctatataacgtggctgaggttcgttaaattctacgaacgccaccaaacctctatttaaggtgcgtcaggttctttagaaaaattttatttagagcgattcagattcagggcacttcagggctttagctcaagataagcggcaaccgttcgttttaaactcactccattcgctaccttacggcgagaccaatccggtgcgactctgtcctgcaacactgattttctctccctgaccccgactcagctctccggagttagtacaatcagcttgtcatctccatcacgtggcgatcctcgtccatcccgattgttcgtaagcacatataacttcccgtcctcgccagcactcacattgcgaatccggccccactcatcttcgaagatgggttccaccttctccacctgtgtgccatcttccgaaagagtgaccttcagcagttgctctccacgcagatttgcagcaatcagtgatccagcccaaggtccttcttctacaaaagctacaccagacggcgcccatgtatcgttcccactatgtgcaagcggagcctgatatgcgccattgtcatcgtcgtctccttctacctcgggccagccataattctctccggccacaatccggttgatctcatcatgattacgctgaccatgttcggtagaatagaggtaaccgttgtccggattccatgccagtccctgtgcgttgcggtgccccatactgtatacaggtgaattcggccatgggttgtctgccgggatcgatccgtctagacctatccgcaatattttacctccaaggctatcttcgttctgtgacagttccggttcataacgctcacctgtcgtgatatagagcaacttgtccgggccaattttgatccgcccaccgttatgattggttccgcctggaatgttaccaagcaactcttgatctatgaccgctttgccatcattcaccttgaggcgtaacactcgattggcaatgtcgtcgccttccaggtaggagtggtatgcatacaagtaaccgttatcctcgaagtccggatcagctgcaagacccaacagacctccttcaccttcttcattaaacggggctgagaattcaatcagtggttcaggagctagttttccatcctcaatgacccgaatcgcaccagggcgttccgttacaaacatccgaccatcagtcacactcacaatctcccatggtgcattcagtccttcaaccagaacggaagcctgatatggaataaccgtctctccctgcgctccactctcattcccacttgctccggtattgcctccgttggccgtctgtccctgacctgttccctgtccctgagacgtctgctctgttcctcccgtagaaggttcgcctgaagaacatgacgcggttaacagtgccacacttaataatgaagcatacagcggaacggttactcgattattcatcattacatctcccttcgtatttcgttcttctgtataaaataaataaatcaagcttcaacgtattgttaatggattgctctctattgttgtggtgttattattcatctgttaagcggtttcgccctgtattacccttcataccagccgcttaaaccgagaattcaagggattccgaggacatgaaatcactgcggtttggaattccatcataatcttttataatagaaggatagtatgaatggaaaggtggacaactacacttatgaatcaaaaccctttatctcgtcttgaagccgatctgtccgggcaaggattggacgccatgctgatcacagatccaaaacatatctactatttaactggatttgcgagcaatccgcatgaacgtttcctcggtctggttctcgcacgtggcgaagaacccctgttgattgtacctgcgcttgatgctgaagctgccgcagccgcttcctcggtatccaacattgctactcacacggatacggataatccatacgctttgtttgatcgttatcaggggcgcttgggccgggttggtctcgagaaagaatacgtgacggtcgcacgttatgagcagctgaccgccgctctcggtgctgccagctttgaagatgttggccccctgcttcgcacattacgtgtgaaaaaaacaccggatgaggtagcccgcattcgccacgccatttatctgattgaagaaacattgcgtcaaggcctctctcatgttcgcacaggtgtaaccgagatcgagcttgtcgccgagatggagtatcagatgaaaaagctgggtgccgacggtccttcctttgataccatggtgctcacgggacccaaaacaggtctgccacacggtacaccaggtgaacgaaaactgcaacatggtgacctgttgatgtttgacatgggtgtgtatgctggagggtatgcctcggatatcacacgtacattcgcttttggtgatatctcacctgaactcaaaactatctataacactgtgctcgcagcgaacgaagctgctatccaaatcgtgaaaccaggcattacctgcgccgaagtggatcgtgcagcacgccaggtcacggaagaagcaggatacggcgagcgttttatgcatagagtaggccatggattgggtatcgacgtacatgagtatccttctctccatggagagaatatggacatcctgaatgaaggtaccgtattcacgattgaaccgggcatctataccgcagcaggcggcgtccgtatcgaagatgatgtaattgtgaccgagacgggtatcgaagttctgacgacatttccaaaagaactgcaaatccttactgactaatccaattggatctatgtcaaaaatagcccagatacatcaatgcttagccgatattatgcatcatgaactaaactgcacgaaactgtgctgaactgtatcttcaaaataatatactcttttcgcgtacgcctcaggcctgtatacagaaaaagtagcacgtacacacgcgaacgaaaaaatcccgcaaatccatgaatatcatgggttgcgggattttaattaatacaaaacatatcctaaattactccgtctgcattctacgtaattttattcctgctcactcatttaccattagtcaaactcatgcgtgatatcctgccaagactccagctgtggcagctgttgcttcccccagtaatccagaaaccattgaataatcccagtcgtatctgttgttctgcagctgtaatgtcggaaaccgtcctcgccttcctgcaaacgaatctccgccaccatctgccctggttcctcaagcgcagcagcctgcatatacatacttccctccaccagctcggaaggtacaagtactacgaattcctgcaattccagattggagatcaactccaccaataacgaggcattaatgctatcattctcgtaggttgtgccattgctttccagtgtataacgcagtgtagagtacatgtgcgattcccctttgtatgaaaatcatcgttcctaatgatacacgcttataacgacaggtcgtttatattataactttttcataaaaatgtaaaaaggatttttcttgtttcgggtcttttctatgaaaaaaacccttgcagagtctgaattacaattgactacgcagaggttttttttaagtgatactctttgaatattgtctaagcctcatccttaaacttaaagctacgtgcagcatacagaaacggcgttccaaccgcagttaatacaaatttgataatatacgtcgtcaggaagatttccagccaaacatcccaagggtagataaacgcaaacgcgatcgtgcagaacaccagtgtatccacaaatgaactgatgatcgaactaccgttggtgcgaatccacaactgattgcgccctggagccaccttgcgcagccaggagtacaatcgaacatccaggaactgacttatgaagtatgccgtcagacttccgagtgccaaacgtggcagcagaccaaacaatgttttcatcgaatcctgtgcaaagtccgtcggtgccgggtcaaagtacaacaccatctgcatcagaaccgttgtcatgatgagcgtgaaaaagccaaaccatacggccttgcgtgcctcacctggtccatatttttcattaagaaggtcactggtcaggtacatgctgacatacatcgtgttgcctaacgtcagtacaattcccatgatatctatcgttttggtcacctgaatgttggctataaccgtagccacaccaatccaggcatagagaccttttttaccgaacaagcggtaacacagcaggaaaaatccataagttacgagaacaaaaactgctccccaccctaagttaaacataaatacatacactgccttcctagttttgattacgcgggatggttacgaaccgcggtttggctcagggccaaaacatgaatactctatcacatttctcgtcccatgaacagaactaaataactccaagcgtgcctgagtgactacgaccccttctatattcctcccgcttccctctcgaccatactagtttttcctacctctattccccttgcaccgtatatcgaaaaagaagactgcttcaccactgtgcacagcatagtttgattgccgcaaaaaaccgccctccggattcctccgaaggacggcttttctcacttgatttgtagacggctctagctatcttaatgtgagcttctatctaatccattctgtattaagcctgagccgcagaatccagctcacggctctgatcgttaaacgtgtcccgatcgttttccttcaaaattctgctcgtcacgagtcctgatgtcatcgacccgttcacgttaagcgctgtacgacccatgtcgatcagcggctccacggaaatgagtagtccaaccagagccacaggcagattcatggtggacaatacgatcagggaagcgaaggttgccccgccgccaacgccagccacaccaaacgaactgatcatgactacgaggatcaaagtcacaatgaagtcccagctcagcgggtcgatgccgaccgtcggagcaatcatcaccgccagcatggccggatagatcccggcgcagccgttttgcccaatcgtagcaccaaagcttgcagacaggttcgcaatgccgtccgatacgccgagtttcttcgtctgtgtctccacattcagcgggattgccgctgcacttgaacgggacgtaaaggcaaatatcagtgttggcagcaccttcttcaaatacgtaaccgggttgaagccggacagagagataatgatcaggtgaataataaacatcacgatgagggccacgtaggacgcaatgacgaatttgatgagctttaatatctcttccgcattggttgtcgccgttacctttgtaatcagtgctagaatcccgtaaggcgtaagcctaagcaccagcgtaacaattcgcataaccaccgcatataccgcattaaccataccgcggaacgtctccgcctgctgaggttttttgcgatccagtccaagtaccgctacaccgataaacgcggagaagataaccaccgccagtgtggatgtacgacgttctcctgtcatatctgcaaatggattcgaaggaatgaattccagcacttgctgcgggatggtctgatccttcacatcaacaagccgttcctccaccttctgaatctgcgcattctcccggtctcctccttgaatctcaatggaagtcaggttaaagccaaggctggttacaatgctgacccctgcggcaatcgctgtggtgatcaacagaatggcaataatggaaacactcatcttgccgagattttgcttgcccttcagattcataatggccgagatgatggacaccatgatcaatgggatcacgaccatttgcaacaaacgaacatatcctgaaccgaccagattgaaccaatcgactgatttcgtaactacatcagaacctgatgtgtacaccaattggagaataactccgtaaacaacccccagtcccagacccgcaaatacgcgtttcgtaaaggagatatgctttttctgcatccagtagaggatgccaagtaaggcaagcatgaccactacattcaatatgactagaaaagtatccatttctttaaatcctcctcaggcatgtgtgtaaccggaaaatatccggttttctcttctatcttttgtacttccgacaaagacattttacaatataacatataacaaactattctggtaggtattaattgatattatgtaatatgcatgtaacagattcatctatttctgaaaaaaatacaccaaatcgtgaaaattgttctattcaacctccggttaattttgtaatataggtatatccgcttattcccaagttttctcaacctataatttaggtctttcttcattggtagataggtcttatgagtatggaaaagcgacaatgttaatgaacttgacgtgaaaggatgatcgtatgtttcgtaatcgcaccgttgccggtaaaatcagaggcaccttgttcctcgttctgatggttgcttccctgttgttcagtattagtttctatgccgtgtcgatgaatattattcaaagttacgtgcttccgcagtttgacaaagtcctaaacacgtccattcaggatatatacaagaatacttctgcctccaaaatcctgcaggtacagagtggcggagccggttctgaaggtgctgccatgaccgtcgaatcgtatctggcagataaagcaaaagaacataatctggatgcagcgtacgttgtcgctatccaagacggctcagctcaagttgtggtggccaactcttcctcaggaatgaaagcccaagacgagattagtgtagaaccaacaatgaatgaagctatcgagagcaaagagatggtaatcagcgaagtctattccgattccttcggtgtacataaggcggcattcattccaattgcaggtagtaatatgattatggctgtgagcatggatgcccagttcattcaagacaagattactcagattttctggttgtgccttgggattacagcattagtgtttgtactcggctggcttatctccactagtatgatcaaaagagttaccaaaccaatcatcaagctcgtccaacatagcaaacaaatatcccagggtgatctgaccgctgaactagagatcaaaggtaaagatgaaattgcccagcttgccgcaagcttccagacgatgacgcataacctgaaagaaatgattagccgtgccttgtccacgtccaatgaagttgtatcaggctccaatgacctgcttcagcgggttgaatcgatgtccggtatggttcgaaactccagccgctctgcagaagatgcagaaaaaggcagcatcagcattgcgtcaagcgcatccgagaacgccagagctatggaagaaattacgcaaggtatcatgcatattgcttcttcttctgctgaagtgtctgaccagattggtgaagcagccaacgaggcagttaacggtaaccgactggctcagaatgctattgagcagatggagcgtgtaggccagacagcaagcgaatcgttgcgatatgttgaaactatgaatgaacgatcggtagccatcggcaccattgttgcttccatttttgaaatcaccaaacagattaacatgctgtcactcaatgcctccattgaagcagcacgtgccggagagcatggccgcggattcgctgttgttgctggagaagttcgcaaacttgccgagcaatccaagacagccaccgaagagatttcggattatctgggtaccattcgtgaagatgctgaacgctcggttgatgccatgaaccgtgtaacccgagagattggttcaggcacaactgtcgttcaacaagcaggctctgccttccagcaactgaatgaattgattcagaacgtgaatctgaccattcagaccgtctcggcttctacacaacaagtatcagctggtgctgaagaagtgagtgcgtccgttgaagaaacggcacagattacgaccaaatcccgtgagagcatgttacagattgcttcaacagcagatcttcagctcagcgagatggattcacattcgaatacagttcgtcacctgcatgaacaagctgtagagctgcaatccgctatgaaaaatttcaaaataaactaacaggttaaccattaacctatcatcacctgttttaaacctcatttaatcataggatatacaatacccccatgtcgctaacattccgtttctagagaacggtttgccggacatgggggtattgttgtttcactcaggtgcctgaacacccataatctcatacacacgcttcatatccaatgccgaacgcaacgattcagctacccgatcgaactccatctccttacgctcatgcgcactatacgtctcctgaagtggagccagtccctttcctgcacgcaaggcattcagccaagaacgtcggaattgatcactttcaaacaaaccatgcaggtaggttccccacaccctgccatctactgagccccagccttcttggaaaggttgaccacctggatgtgagatttcaaacaacgccgttacacgttcaggctcgtggcactccgtaacgcccatatgaatctcatatccgttaatgggtaatgaagcatctgctacatctcgctcaccatacagacgaatcgggtgatcaggttgcacccgtccggaagctctgacggtctgcttttcctgaagaaacgttgtcgatagcgggagccagccaagtccttttgcttcctggatctgattcgcctccacagcaaacgggtccttcagatgacgtcccagcatctggtatccgccacatattcctacgagctgaacatgctcacgctcggtctggctcgcaatcgcctgttccagtccagactcacgcagaaattccaggtcacctatggtatccttcgtacccggtagaagaatggcatccggactgcccaattcctctggcgaggtcacgtaacgcacattcacatccggttcacgggaaagtgcatcaaagtctgtaaagttggaaattcgcggatatcggattaccgccagatccagctcggttttgccggatttaccatgacgcatggagtccagcaccaccgaatcctctgcttcaatctgaatatctcttatgtaaggcaaaacacctaatactggaatgcctgtccgttcttcgagccagtcgagtcctggttgcaacagggacagatcaccgcggaacttgttgataatgaaccctttgactcgcgccacctcatggggttccagcagctccaacgtacctacaatggaagcaaacactccgccccgatcaatatcggagatcagaatcaccggcgcatcggcccagcctgccagattcatgttgacgatatcccgatccttcagattgatctcggccggactgcccgctccttccatcagcaccacatcataggtgtcccgcaaccgattcagcgcctccatcaccgtctgttttgcttcaggcaggaaatgctgacggtagtccgatgcactcatctgggcaaaaggtacaccatgtaccacgatctgcgaatgcatgtcccgtacgggcttaatcaggattgggttcatatcggttgtcgcctcaataccgcaggcttcggcctgtgccccctgtgcccgaccaatctccttgccatcttccgtcacataggaattcagtgccatattctgtgacttgaacggagcaggcttgaagccatcctgcttaaaaatccggcacaatgccgttgtgatgacacttttgcctacatcggaagccgttccttgcagcatcagtaccgccgctggttgtgatggcctatcttccacgctctctccccctgtctccgtgttatatccagatcaccttgctcccaacctcatgcgtaacactttccatactgcttcttacttcaaagttaaagccagaacagtccttgaagcacactcagcacagtcaacaaagccgcctccagcagctcattcatggcaccatacgtatccccggttaaaccaccgagccgttcactgatccgggcagccacgaatcggccgatataataacacgccacaggcagtataataactgccgccaccgggtatagccaccatggcagtgttcccagaccactcaccatcgcatctgcaatccccatatccggcttgaaaagccacaccgcggcaaacgtaagtgcccctgctaccaaggtcaggcccacagctgaacttcgtgcacgctggacctccttccgctccccgagacctttaaacaatacagcaagtccatcatcttcgcgcgcattcggccaggccgacatcgcatacaccatgaaccagcggctccagatcatgggcaggatcagcaacgcaccgtacacccagtggccccgggcaataaaatcagcgatcagcgcaaccttcatcatcagaagcaacacgcaggcgatcacgcccattgccccgacacggctgtccttcataatctccagcatccgttcacgggtacgataactgagcaagccatccgccgtatccatccatccgtcaagatggagccctccggtaagccatacccataacgtcaaggtcaggacggcagccggaaaggccggaagcactgcaccgcttaaggctcccgcgagccagacacacagaccgattgcagcaccgaccagcggataaaagacaacactttcccgcagcaacggcgggacaaaatcgatttgcattttgacagggaaacgggacaaaaattgaaaagcggctgccgccgcatgtttgcgctgaggagcaggcgtgccatccttcataagcggtactccttgctttttagttcaatcgcaatgcctacggtcaccagaaacacttcaccgcatatcgccgcaatacgctgattcagtacaccggccaaatcccgatatttcctgccaagggcatattccggtacgatcccatctcccacttcatttgtaaccaaaacaagcaaaccgggataggttcgaatcgcttcaaccaacgcgtccaaatgtccctgtaacacctgcttctcgtcatgctcatgcgctaataaaacatttgtcagccacagcgtcaggcaatccaccagaatggtgggtgcagaagtccctgtatgcccttcacccatgcggcttatcaaagcaggtagatgtatcggctcttctgttgtatgccacagataccctgatgcctcccgctgatgctgatgcatggcgatgcgctcacgcatttcatcatcgtacgcctgagctgtcgccacataccacgcctccgaggaacgctgcatgcagagtcgctcggcaaaggagcttttgccactgcgtgcgccgcctgtcaccaatacgctcatcgggaactctctccttgcagggatgaatccaccgacgcagcggagtccgaagcatggcttgccccgtccgagacacccgcgcttgcaaaggtcgccatttcgttcagaatgagacatgctgcgtcaatcagatgaagactgagcacgccgcctgtgccttcacccagacgcatgtccagatccagcatcgctttcaggtccagttcacgcagcaacgctccatgtccattttcgtgtgacgtatgagaagcgatcatataggctgtgctcagaggtgcaagttgtctcgccaccagcgctgccgcggtagagatgaacccgtctacaacgacagggcaacgatgagcagctgctgcgagaataacccctgtgagtccggcaatctccagtccacccaccttgcacagaacatccagtgcatcttccgggtttggtgcgtttacgctaagcgcccggctgactacagcagccttgcgctgcaagcctgcatcatcaatgccggtgcctcgccccacggcggcagctggtgcaactccggttaacgcgctcattaccgcagcacttgcagtggtgttgccaattcccatctccccggtgacaaacagctgtgttcccttcgccacctctgccgatacaacttcggctcctgcaaggatagcgctgactgcctcatcccgggtcatcgctgcaccccgggccatgttggccgtgcctttgcgaattttgcgggaaagcaggtccggatgttcaagatcggcattcacaccaatatccacacagatcacatctgctccggcgtgacgggcaagcacattcactgccgcacctccagcgaggaaattcaggaccatctgcggggtcacttcagcaggaaaagcactgatgccctcttccactacgccgtgatctgcggccatgacaatgaccgctctgtgatcaaaacgtggacttgcattgcccgtcatacctgccaagcggatcaccagctcttccaatttgcccagactccccggcggcttcgtcaacgaatccacatgcgcagaggtttctgccgccacttcctggtcaggagcagtaatcttacttgttaaatgctccaacacctgttcattattcatacaaccagcacttccttcatcaaaatatgggttgccccgcttcatttaatcgatgtcccgtcgcagcagcagttgaggtatggcatggtcgggatgagagacaatcgcgggtttgacgcgaaatatatcctggatattctcatcgttgatcaacgtatgaggtgtaccctttccaaccgccatgccctcacgcagcgccagaatgtgatcgcaaaataacgcggccagattcagatcatgcagcacagccacaatcgtaatgttatttctctgtcgccatgccgataacaattccatgaattgcaattgatatttaatatccagaaacgtggtcggctcgtccagcagcagtaacctcggctcctgagccataactttggctagtgcgacccgctgccgttgcccgccgctgagtgcatccagcggtctgtccgccagctctgtcaatcccaggtcttcaagcaccctgtccactacaagtgccccatcgcccacttcccgccccagccagttctggtatggatatcgccccatctccaccacgtctcgcacgggataggagatggctggtaagccatcctgctgcaatacagcgatcatgcgcgacaggtccttacggctgtaagagccgatgtctcgaccatcgatacgaatctgaccttcgtttaactgttccgttccggcaataagctggatcagggtggacttgccactgccgtttggtccgacaactccccaccagtcaccttcgccaacatgccagtctacattgtgcagtgcctgatgattgccatatgacttccctgctcccttaatcgagataagtgaagtcgagttggaactggtactggaattcatggcatcatccccttctgcaactttttgttccggttcagcaggtaagcaaagaacggcgcaccaacaaaggcggtgacaacaccgagcggaatttcagttggcgccagcaacgaccttgcgatggtatctgcccacaccatgaagatcgctccaccaatggcagacaaaggtaccagcagtcggtaatccggtcccaccagcagtcttaacatatgcgggatcaccaatccaacgaatccgatgacacccgataccgagacagcacctgcggtcagcagtgtgccaactgccagcacggacagcttgagtctgtccactccgatcccgatatgtgcggcttgacgttctcccagtgcaagcacattcaacgagcgtgcgcggctccagagaaagaccagccctaacagaaaatacgggaaaaggatggccgtatacgaccacccacgcagagccagacttcccatcgtccagtatataatttcattaatcgtctgtttcgacatggtcgacaggaaggaaacaactgcgcccaggaaactttgcatgaccacaccagccagaatgaggctgtgtgtaggtattttacgcccttcacgagccagtgccatgacaaaccataacgtgattacacccgtcaaaaacgccaccagtggcaacgtccagattccgatcagtgcatactgcaatccgaagaaaatcagaaaggctgcacccaccgaagcaccggatgacacgcccaaggtgaacgggtctgccagtgggttccgaagaaccccctggaatcccgtaccggcaatcgccaacgatgcgcccacgagcacggcaagcagtacacgtgggaatctgactttccagataatctgttcggctgccttattccaatccggtgtaatccaatcgcctacccatggaattttgtgaatcaggatgcctgcaatatcccggatcggcaacgctactgaaccaatgcccgtgcagatgagcacggtgagcaccagcagcaccatgcccgtcgttccgaacaggatcagctttttactcattggaacaagtcagggtagatcgctttggctacttctttcaacccttgagttacccgtggacccggacggctcagcaggttggcatccaggccaataaccgcgtcatttttcacagccgtaatttgatcccagccgctgcgcgccttgatgatctgatccagtgttttagagttttcgtcaatcacatcgttggcgtacaagatcacatccgggttggaggcaatcacgttttcttcattaatttcataccagccctctttgtccgaagcaatattggtaccgccagctacagtgatgagttcatccatgaattcgcctttacccacagtccagcctggggagaattcaacgtatacttttttcttctcttccggtttaactgccttcaccgcttcggttacatccgtcacgtcctgtttcatctgggtgatgatttcttgtgctttttcctgatgatcggtgattttaccgaaggtttcgatattgttcattacatcgtcaatggatttaggatccgttttgaaaatggtaatgcccaactcacgcagtttcttcactgcatcttcgctcatggaaatacctgtgaagacaatgtcggcttcagcggcaataatagactcttcattgggcttggtgataccgcccattttagctttggttgttgccgcttccggataatcgtcatagtcggatacaccaacgatttgatcgtccaatccaagggcaaacagggattccgtctcagctggagacacggatacgattttggctggtgccttttcaaaggtgaacgattcacccgttgcatccgtaacggtaagtggatattgtgttttgaggtccgcctgcgcctggccttgggactgctcctgtgccggttgctgtgaagtacctgtaccctcgttcgttgttgcattgccacatccggccaaagccagtgcgagtgccgctgcacttagcagggacgctacgtttttccaattcttgaaattcattctgttattctccccttctctatttgtactattttcttgcatcgtgctcaaactcttactccccatgccttggtgttcctgtgtaaggtttgaactgcaacatttacacgctaacggagagtgcagaaccaatctgaagaaacgaagtgttcgcctttatcaccggattttccatttcaaaaagggaatcaaaaaatctggggataacagcgatcggaagatggtactgcaatcggagtgacctcgtgtaaaattggtctcggttcatcttacatgaacaataaaaaatccccaatccttagacaaagattagggatgacgtctcgcatatggcgatctgtacatgttcaaccaagggttgtccatgcgcatagaatagcccgaaacgctgtcctttcctcgaaggaacaccggtttgtacgtccagggcaggtaacctgacttacaggaatcatcctgttttacagtggcgggaccgtgccggatttgcaccggcttccccatttcacccttgtgtgtttcatgactcgtactaaatttgccatgaaaacagccttcacacgcgggacccttggtcgctgatatggtaaaccattgccgtgtaatttctgcatgctacatactcgttcaggcttcacacctgcagcgtatctgtatccatgctgaagtcacacttctgttgtgattatagggtatattgtacatccttacaacccgatcggcggaaaagtcactatgctgccaaaccactgattcccctgttgatcaagctgaacctgaatcacctgtcccggtacgacatgtgtatcccagaacccaagcccggctatcagacgggacaaggcataccggatgacaccaccatgcgtaaccacaacgatggttgactcgcgcccctcatcaacgtgcattgaagaacgaccctccaacaacatctcttggagaaaggaatccaaccgtccggtaaactcctgccacgattcccctccgggcggagtgacctcctgcggcgcatcaatccagcttcggtacacagggttatccttaagctgatcatacgtcagcccttcccactctccaaaatcattctcgcgcagacgcgagtcgaacttcacctgtccgatggcatcgggaagaatctgttccaacgtctgccggcagcgaagcagatcactgcaatatacctcgttccacaaaacaccgctcaattgttcatgaagcggagccagttcttctttggcattgagcagcagaccgatgtcggtatgccccaggtatcttttttccacattccacagcgttgtcccatgacggacccacagaatgtttcgtttcagcggcccaggctgattcgtatgtacttcattgcctgcatttatgaccataacagcgtccctcctaccagccacacacccagcgttatgaacacgcatagtaccacaaaagcccctgccgaccagaacatcagacgtgatgtttgcacaatatcctcggcttccatcggccgtgtggattcacccatgtaggcacgaaatgaagcaacgccgtgatacacgttatgtccgccaagccggatgcccagtgctccagccaccgctgattcgggaaaaccgctattcggacttggatgtaatcttgcatcccgtgcaaccatgcgtgctgctcctttggcgtccagcttcatgacccaggcacccacgattaacagaatcgcggtcagccgggcaggtatccagttcgccacatcatccagacgggccgaggcccagccaagatgcagatacttgtcatttttatatccgaccatggaatccaacgtgttgacggcgcgataagccatggctagtggagctcctccaatgagcgcatagaataaaggcgatacaatggcatcaacgatattttcggcaactgtctctaccgttccccgcacaacctcgggttcatccagatgcgccgtatcacgtccaacaatcatgcccagtgaacgtctggccgccggccaatcctgctgcttcagatgacgatacacttccatacctgcatccttcagcccttttgaagcaatggttgttgcaatgagcaccacttcagctaccgctgcaatgacaggatgaatcagcctaagaacatatacgagtccccaagtgatggcaaaagaaccccccacaatcataattgggaacaacagcccggctctcttcagccccgaatctgtgatcacacgcgagcgaataacacgctccaacgccgagatgccttttcccatgccaatcaccggatggggaatccagcgcggatctccgatacatcggtccaacaggtacgctagtataataatccaggctcccgccatgcctgtccagaacggccaggtccatagatgctccagctcaaaagtcatttgttcctgaccctctctttccataacagtccggcccgaaggctctctgtcaccgtgtcgtataccaatctgccaatcgccgcccctgccgtagtcgctgtcccggcataagtgatcatcggcggaggttcctccacttccactgcctgacctactgcaatcacaatggcgtcggttgtggtgccggtagcgggcaacccgttctccgaatctagaacacccgcatccgccagcgcggccgctttggcttccaccgccgtctgtactgcattcaccatcgccccgctggtcatgcgtccattcaaccagagcatgatgttaattgtacccgggacataggatggcatcatcagatttcgtgctgaaggagcagagcgctccctgccggaagacagcgtcttatttccctccgcatcaaataccgttctctccgaccccgctcgtgcggcatttgatacacccgcagtggtgcagcacagaaggccaaattcattacttgtatattcctgaatggaggtatgctccagccttacggccgtcaataatccggcacattgatcccgcggctcttgccattcgttcagcgcttgttcgatatcacgcggcggatcatcacagcggtaatgcctgtccacatagatgttaaatatgcgatccagttcaaacatcccaccgccatataccgcactcgacagcgcttgggcagtccttggactctgtgctttgatatgtcgttcatgtgcagatatgttcagtcccggccaggaagaggaagcatattcattctcgtctgtttctccattcgtaaagtagttataaaacgggagtgtcattgccgctcccctccctgttcctcatctttcgtctgatcaacattcggatatcccttggtttccagcacgctgcccagcacttccagtaatgtagcattggcgtctgcatccttgactgcgaaacgtacatgctctttgtcaagccccggatacatggcacagctgcgaatcagaatgccccttcggcccagctcctcttgcattgatgccgctgtccaaggggccggcacacatgccaaaataaagttcgcctctcccggtgtcaccgcacatccgtacgccttcagcccttcgatgagacgtccccgttcccgcgtgatctgtgacatggtctcctgttcgtaccgttctccactacgcagacaggcttcccctgccatgagcgccagaccgttgacactccaggtcacctgtttctttgtcatcgcctgaatgtattcggcacggcccagtgcatatccgagacgcaaacccggaatggcataaaacttcgtcatcgagcgaatgatgatcacattaggatagtcattcagttgtgctgccagggactgacgccggtctaccggaataaaatccataaaggcctcgtcaatgacaagtacggttcccgtttcttccgctttgcgtgcaagcctttgtaatacctcaagtggatattgtacaccgtttggattgttgggctggccgaggaagagcaggtctaccttttccatgagctgctcgatgtcctcgggttccgctcgccacgccagttcttctcttccctccgtatgcacaacctcggcaccgaattgtcgtgccaacgaccggtactccgaaaatcccggttccaccgtacccaccttgcgcggggcaagccccagcagaatgagcgccatgctttcggctgcgccgttgcccacggaaatctgctcctgcatcacaccaagacgctcgctcagcagtgctttgaagccgcgatgcgccggatcgggataccgaatcaccgactgcaatccttgctgtatagcctccagcacccctctgggtggaccgagtggattaatgttggcactgaaatccagaaaatcagcggcttccctcccaaatcgtgacgcagccgtctccacgtccccgccatgtccgaacacttcgatataaccggtcattcttccgtcatcctttctgtatgtcctttttattatggatggcacgggaggtgtgggtcaatcctgttttctttgtgtcccaaccataattcgtttacaatagaagaggaatttcggttccttttgatatacaaggttcactacataagggactagcaatccctcacatacattaatggaggaatgaccatgctgtttgtagacaaccagggcattacagatccttctgtaaaccttgcgattgaggagtacattctgaaacatctgccgatggaggatgacagctatctgctgttctacatcaaccgtccgtcaatcatcatcggaaaacatcaaaatacgattgaagaaattaatatcgagtacgttcaggataacggtgtgcaggtggttcgtcgtctttcgggaggcggagcggtatatcacgatctgggcaacctgaatttcagttttattacagcggatgacggtcaatccttccacaatttccgcaagttcacccagcctgtggttgaagctttgcacgagcttggtgtaaatgccgagttgaccgggcgtaatgatctgcaagtgggcgaaaagaaaatttcgggcaacgcccagttttccacacgtgggcgcatgttcagtcatggcacattgatgtttgatctgaatctggagcatgttcaggcttccctgaacgtcaatcccgagaagttcaaatccaagagcaccaagtccgtccgcagccgggtcgccaacatacgggatctgattgacaccaacctgacgattgagcagttccgcgatgagctgttacgtcacattttccggatggagcctaaggacgttccacagtacacgctcactgacaaggactgggacaaaatcaaggaaatctccgctgagcgttataataactgggactggaactatggcttgtctccggaaagcaatgtgaagcacactcgcaaattccctgtcggtatcatcgatctgcgcatgaacatcaaggatggacgcatcgaagatatcaaaatctttggggacttcttcggtgtaggcgatgtggcggatatcgaaaatatgctgcgcggcaagcgttatgaggaaaccgaggtgcggactgcacttgagggcctggatgtaaaacattacttcggcaaccttgagctggaagactttattggccttgtttttttggaagagtaaaatttagatgtaagtatagtcttagaacgaagtctaagattacacgttaacggagaagacagaatttatcgggagaagcgaagcgttcgcctttatcaacggatttccccttgggggaatggaatcaaaaaatccggggataacagcgatcgaaagatgaatctgtattcggagtggcctcgtgtaaaacttattttttcgttcattagtatagatacagataaaaaaaggagagaaacacagatgagctacaaattgattgcaatcgatattgatgacacactgatcaacgacaacaaggaagtaacccctgctacacagactgcactggaacaagcagttgcccatggtgtaactgtaacgctggcgactggacgtgcttatgcctccgcacaagcgctggctcgtcaaaccggacttaacgtgccgatcatcacgtatcagggcgcactggtgaaaaacctgctggacgaaaaagtcctttatgagcgttacgttccacaggaagcttcccgcaaattgtatgattactgcctggagaacaatctccaccttcaaacatacattgacgataagttatatgcccgtgaggaaaacgacaagctgcgtgattatgccaaattaaacggcacccaatattacatcgaatctgatttcatcaaagtcatcgaacaaaaaacaccaaagttgcttattatcgatgagccagactacttggataaggttgccgttgacttgcgtgaattgctcggacctcaagtccatatcacaaagtccaaaccttacttcctggagatcatgcacaacgaaggaactaaaggccacgccctgaccttcctggctgaccatttcggtcaccagctcagcgagtgtattgccatcggcgactcctggaacgaccatgagatgctcgaagttgctggtcttggtgtagcgatgggaaatgccatccctgccctgaaagagctggcggattacattacggcaagtaataacgaagacggcgtgaaagaagttatcgagaagtttgtgctgaacgcagagtaaataagatcaacgaacagcccagtcggcgaatttcgccgtgcagggctgtttttttaattttaaaaatatgttcattatcctatttagcgattatatttggtatatttttctgttattttttatgttttgagagcaacaatgcggtaatcaaggataattgtagtgaaatcgtaatcgccatagataagatgacacgatttgtatcttggacatcggcaaaaaacaaaacaataaaaaatacaatgaatgagattacaatgctagctatgaaatttaaaattattcgtttcatgttttgcctactttcacgcaccacgattcattgttttacttgctcatggcatgctggaaagactccagcagtttcttgatttgcccatcaaattccagttgaaatgacggaatgatctcatctattctttgctggaacagctccagatcttggacaccaagctctgctcttaactccatttcttctttggaaccgttgtcgttcaggatcatgttcaggatttcacctttaaagtattcacttggaggaaggattagagcattcatcaggaactgggtaaaaaagagatgtttattattttcctgactcgcctttttcatcgcctgcttagtaaacaagtttatatacttctgagcaaaagtaactcctttcattcgggaaggcccaacatgttcgacccctttccaacgcagatcggccacagaactaagccaccaggccggttcaatggcctgctgcatacgaagcaacacttggcgctcaaactgcggctcaggatccattcgctgctcatccaagcatttccctatggtctcggcttcaattgcagctaccgtcatgccttgaccatggatcggatcgaagctgcaaaatgcatcgccaaggacaagtaatccggagggccaattctccatcagttcaaaatgttgacgaacagactcggaaatacggtatcccctcggcccttgaaaaggctccagctggtctgccaacgctacgatttcatccgaagcaaacagatgtttgatttgctcttggaactcatccggatgggttgacggatattcatctcctcctgcattgaacagtaacagtccagcgatatcattttcaatgcgccacaacatgcctgcacgagttccttgcacaggatcggactctgttatcaccgttccccaatcattttgaatagaggatggtatcttataatagcgggtgctgtaaccaagagacaccttcagcacttcctgctcaggcacggacaaccctatctgttcaagccatctgatcaatttggaagaacgtcccgcggcatcaataaccatatctgctgcaagcattgcttcccgattatcccgacctctttctttggtatacacgcctgtaatcaaacgctgatcttctgatgccattaacccggtaacttccgtactcgttaagaagcttatatgatctatgctctggactcgctgacgcaatacccattccagcagtgctctgctgctcgatgcaattttgaatgaggaagcggcatttgccttattgactaatgtaccatagcgattggcaatcacaattttctcttcatgcgaaggaatggcgccaagcgcgaccaattcatcattgtatccgggaaagtaatgttccagaatgagtccgccgcgcggtaatacacgatgtggatgaaaggattgaggcacaccctgccgattcgccggctcagaaggcaattcatctcgctcaatgatacatacctcatcataataatcagataacatccttgcagtgattaaccctgcgatacctgccccaattaccacagcttttttcatgtcggacattgccacttcatcctctccaatccatcatattttatctacacttgtagctctatctaaaaattacttataataccaatatacacttggaatctcgtatcatgtaagaatcaatgtgttgatactatatagctaaactacaataaggaaatgatgtagatgaaaatgattgataaaaaggtggatttgagagttacccgaactcataaattgttaacgatggcgctactcgatctgttatgtgagaaaggccagctattcagcaacatcacaattaatgagatatgtgacaaagctatggttcaccgaacaacgttttacaaacatttcaaggataaatttgctctgctgtccaccaccctaacttgggtccttcgggattatttacacatgaatgtagaagaccggttacagcagcctttgcaaagcgtatctaaaatgctgttcggaaatgtactggagacaattgtgcagaaccagcagaaagatgaggggtttaacaactttttcatacattatatcggagagatattcagacgagattttctggaattgaagagaagaggtaaacaattttcacttcccatagaactggtagccgagtttcactcgggggtgattcgtttacttgtgacgtggtggatacaacattttgaagaaaatgttacggcagaacagatggatgaatattactacctgctggttaacgagaacatcatgttggaataacaaacagctcaacctaaaatcaagggctgattttgagattgagctgcatactttcaaacttcacctattttaaaaccgattcggaagcctgcactgtcatcctcgcacgctttcctttcttcaaccagctgctcaccttctcattcatcgccagcagacctgaaacgaccagcaccactccgatccatgtaacccagctgacatgctcaccgtaaacaacagcaccaagccctacggcaatgggtggtgaaatgtataaccatgttgctggaaacaacgggttggtacgcgacataatccaatagaacagactatgccccaccatggagccgatgacagtcagatagattaccgacgagacggcaggcacccagtccagagcagacatactccacgattccgttgcgaccgagagcagggataacaacagtcccccatacatcatctgcaccgcattgatcgctacaggactagcctccttgaactgatgaataacctttttggagtacaatgcacctgctgaataacagacctcccccaccagtaccgcgatacacccccacatgaacagggaacctgcaccaagcgatacacctggcaacacaaccagaaccacaccggtgaacccgatcaggcagcccacaatcatacgggcagatgttttttgccgtaacagcgccgtctgcatcaacataatcatcagcggccctgtcgctgacaaaatggcacccacacccgagctcacatgctgttcagcccaatataatgtggcaaatgtgccgaaggtcagccccgctcccgttaacaacatctccttgcggaacaggagcgaccagctcactttgcccttcatcctcatccatgcaaacatcagcgctcccgcgattaaaaatcgcaatccggctgacagaaaaggcggcatgcctgcctctactccaattttaatagccagaaatgttgtaccgaaaataagacacataaccgtaaatgcaatccccaccatgataaccactcctttatctgttctccatcatatctcatggtctatagaacagaatgaacaaaacagaacagttttctcccattagctgttacaatagagttcaaaaggagtgtgagccgggtgggcagaaccatgatgatgacagataacagcctgaaattatatgagcaagtaatccattatctcgttgtacgtatagaagcgggagagtgggccgaacatgaaaaactgccatctgtacgaagcctgtccgagctactcggcgtacatcgcttgaccgttttcaaagcttatcaggagttaaaggaacgtgggagtgtttatgtgaaggacaagtccggctattatgtcagtccagcaactcctttctcagtaacggatcaggcggatgatcctgctgtgtctgcttggctgcattgggattcactagcacgggtacagtcccttgaagcagaataccaattttccaaatcgttaatcgatccctctctgttgcccaaccgttattggggtgaactaatgcgtgatctgctggatcaatatccccgtttgctcggaacgtattccacgattcagggagatctggaattgcgaagtgcgctggcaagccatctaacgaaaaaagaacgcttctatctctctgcagacgaagtgcttattacttcgggggcccagcaagcgattgacgtcatctcgaggacactggtcaaacccggggatcgggtgttgatggaacggcctacgtatggaccggcaatggagattttccgcaaacaaggtgctcgtctgatctttacggatattcactcggatggttatgatctggagcagattgaacatctgatgaaaagtgagaagccgcgtctcttttatatgacaccgacctttcagaatccaactggcattaatgttcctgtagaacagcgcaagcagttacccgaacttgcagaacagtatggttgttttctgctcgaagatgatagcacctatgatatctattttaaagagaaacctcctgcacccattttcacctacgacaccactggacacaccctgtacatccgcagttacagcaagtatgttgcacccgggctacggattgcagccatcatatgccgtcagcgtttcatgccgggactacaggctgtaaaatcactggcagataacggaacgccccttctgaaccagaagctttttctccgttattttcagtcagaacgcatgcatcagcatctatccaagctacggaccgccatccagctacggatggaagtaatggaacaatctctgctggaaacggactggacgtggaccctgccggagggcggactcaacttttgggtagagcttcctgagggtgtggatacagggagactgcttcaccgatgcatggaacaatccgttgcctttgtaccaggaacggtatttgattcttcggatcattcagccagtcgcaagctgcgcctgtccttctcttatgcacatgagcagcagattcgggaagggatgagcaggctcattacgcttgcgaaagaaatgtaacattttgatactcttggattgaagccaatccgaagaatttcaagtgcaatttgccactcgtatcgctgcatcaaaaaagtcgccttatggcgactttacttttggtgttctatattctctacctgcacccgctctgtgcttaaaggtcttttcttgcaaacaggcggatcgtaataagataagacactacaaacaaacctataatgcctacagaaaccaatgccattgtcgttgtggtaatcataccgttctcgttggccatactcatgaggtacgcaacgggttgcgccagtataatcatgcagaccatgaatatcgcattgatgataccagcaccttttttgctaagtccgtagaaaagaggcatgtatatggaaactaatacaagcaccatgcctacggcaatgacaatatccctaagtgaataatttggcttgttcagttcaggataattcaggttcacaagctggtgaatcccaaacgacgcgagtaccccgaataacgtatagattatagcagaaaggtacttggtttttacaatttgtttgcggctaacggggagtgtgaccaggaaattgtgattatgattcttgatatcaatcatggttgccagcatgaccgaaccaaaggctgtgtagatgcctacaaaatacattgacatttcactcttaggtataaaggcgagactaaataccaccaggtataacccaatcgtccacagtgaactttttagtacaatgaaatctttacgaagcaagttaagcatatttgcgtcctcccttcgccgtaaaataaatgaggtcttctaacgtaggtctttgtaaaagagctaacctgccaaataactgttcggcctctgccttatgatccgacaatgcttcaaaaccaacggctgtctcgcgtattccgatgaaatgtttccgaatgtcggaatcaagcagacccatatccccttttacaatcgtatacctttccagcacatcatcttttgcctcgttaaacaccagtttcccttgatggataaacgtaatgtagtctgcaatacgttccagatccgtcgtaatatgcgttgagaaaataatagaccttgtttcgtcctgtatcatatctgcaagcagatcaagcagttcccgcctaaacacaggatcaagcccggatgtcggttcatccataatcagcagatccgcttcatgcgacaaagctacggcgagagaatacttaatcttcatgcctttggacagatcctggattttctttttgggagacagttcgaactgatccaagtagtcattgaacgctttattatcccatttggtgtaaaaaggagcgatcatttgtgtcatctcccggatcgttagatgctcataataaaagcattcatctgacacaatgccaaggcgttgcttgatatcaacttcctgatttggcatctcactgcccaatgtcttgaggctccccttatcgggctggatcagacccgtgatcattttgatcaaagtactctttcccgccccattcggaccaataagtccagtgatatatccttttttcacatcaagagatacattatctactttaaataagggataagttttggttacattacgtaattcgatagcgttcattattcttattcctcctcaaccaacaatgtaagatgatggattacatcctgtgaactcatgcccagttctctgctctcacgaatcacttcgagcatcttctcttccaattgtttcatccgccgctctcgaataaagtcctgattggctccggatacaaagctccctttgcctacaactgaatcgatcagtttctccttctccagctcttcatagacacgtttagttgtaataacactgacttgcagatccttggcgagctgccgaatggagggaagactatctccagcaaccaattctccgctcaagatgctctgtctgatctgagttagaatctgcatgtagatcggatcgctcgaagcattcgatattaaaatgttaatctttcctcacctcattgatgttacgtagtttccagtaggtatagtgtatatatataatatatacactatacctaccgatggtcaatctttatttcacattattctcattctgattcgatccatagacacaggctagctaatctggacgacaaaaagaggacgtcagtttcctgttcgtcctcttgattaatcaagcccgtaaggtcacatgaccttccgggctactattatgagctggatatgaccttatccaccaatccatattcgactgcttccgcagcggtcaggaaataatctcgatccgagtccttctcaatccgctcaattgactgtcctgtatggtcggctaacagcttgttaagacgttgacgatgctgaatgatgcggttagcatgaatcagcatatcggatgcctgccctcgcgtaccgccatgtggctgatggatcatgatctcactgttgggcagcgccatacgtttaccttttgttccaccgaccagcaatatcgtaccaaagcttgccgccatccctgtacagatcgtggagatatccggcttcacaaattgcatcgtgtcatagatcgaaaatcctgcggtcaccgacccaccagggctgttgatgtacatctggatatccttttccgggtcctctgcagtcaaaaacaacaactgggccacgatggcatttgccatctgatcctcaatttctccggacaccataatgatccgatctttgagcaaacgtgaataaatatcataactccgctctccgcgagctgtctgttccactacatagggtactacattcatgtgtgtcgcctcctcggtttaggcaaccatgttgaccgtgtatcctcctccatacgacatcgagttcatgccagaagtagagtacccgtacatcattggttgcaaggttggagacggcaaagtatgctgcaaaatcgtgcccgccacagccatcgggtcatcggtccggttcaggcacagatcaatcattcgggctgtatccccattacgaaatgccagcagatagctgcgcagttcctcccgattgtcctccactgcgccttcctcatactgcaattcagcgtccgattgttccaacctgtgcctcacttcagctatggcagagcgagcacgacttaacgctgctttcacagcgccttctgtcgtatccagcatttccgcagtctctgccgccctataacccattaattcacgtaatacatatatcactcgctgccacggtggtagcgtatttacaagaagttgtaaggcagactccaattcctcgaatcgcctttcctcctccatttcgtgaaggagcggcttcaagctatccagtttataagccaatctctcccgctgacgtaagatatcaatccagctgttgcgagcaatacgaatcagataagcttcccagtttatatctttattcatcccggaagttccaaccactctcgacgacaacactttgagacaggtctcctgaaccagatcctccgtgtctggaactgatttcgtcagagatagacaatacgcatacaacgaacccatcagatcgggtagtacggtatggatgcttgggttcaattgattttttctgtcgttgccattaaattcaatatcgaatttatcttgtttaccatcatcatgtggtctgttgattctgcaatccacggacttcacaaaggccatcttgggggcccccctttgctggttcctgattgattttgacttacactatgtaaacgaagaaccccttgtaaaggatacgctcttctgaatttatttttgttacgctagttaggttgagttacgcattcgtttccagctttaatgttccaagcggcaccttcatcccggtaagggcaatcgtaataccttgatccagattataattctgccgtacatcgacgtcatgagacatatgtgtaaaataagtatgacccggcttcagttcccacagcagctcctgcgcctcacgcatatcgtacacggaacgtgttgagaattccgcaagctcatgcacaaagcttgttccaagcaccaacagatccagtccgtgcaaaggctctttctcggcatccttcaggtcaatagcgtctgaacaatacgcccagctatacccaccctgatccaatcgataggcgtacgaatacccgttatgtccatggcatactttccaggaatgtaccttccagccgccgagttcaatatcatcatccgtttccagaaagtccatatgacgacccaaccagggaaactgtccctgaatggtggcaatcacttcgcgtggtgcatacaaacgcccctttacacccaaccaccggcatgcatccgcccattccggcaatcctccaatatggtcaaaatgggcatgagtgatgagcagcgtatgcaccatgcgcaatccctgatcctccatctgtgatctccagtctggtccgcagtcaatcatgaactgttcacccgcaccgtgcccaccaccgtcaatcagaacagaagagcgtttccgtttattctcccccgtaagccttgcctctgtacatacttcgcaatcacaatacacacgtggaacgcccatcgcatcgccagtgcccagaaatgttagctgattcaatccgcattccccctgaattaatgatatgtagattgtaatcttccacctccgtttttgcaaaaaaaagaccatcccgctgcagttatccactgcaattcgggacagtctgtggtctgacacttcaccgtcagactttaattccatgcttcgctccattcggttgcgtacgcttcgtcagcatgtggtgcaaccttataagcgggtcatccacatgaagatcacgccttaccttttaaacaggccacgaccgattaattcgagtcacatccactccgcgctggaactataccagtgcccgcagcttcaacgtcagttcctgacccgcaggtacatccttcgaatccgtaatgacccagttcgatgcaagccgcttcgccagtacctctgcctgctccggtttcaactgtaatccggtgatgattccttcacccactgtgaagtctttctcgggctgtaccttgaaggctttctccaaccagattccaagcccaccacgcgtgttaaaggtaatccggtagccatcttttactgctgcctccagattttcaccatgttcatccgcatacgagaaaaattcggtatatcggtattcctcttcagacacggcgtcaaaagcggaaacgtctttcgcttgaatagcttttaaaatttcttcctcaggcatccccttaccgcgggcctgctccagtcgaattgctgtactttgggataatttgatctctgcactcatccaactcacaccttcctgctagtactatgtaacaatcatgattcagtatacctctattataaccttttggcagtaaaaaaccttcatctctacttccattgaaatgaaggtttagtatccacatgctcggttacctattcgattacatcagcaatactcataatccagcgagcacctgataccacacgccccgtttggagtacaacgtactgcgtacctcgtcccatccacccagatagttgatatcaaataatccttcaggcgttgggaatgtggactcggtctgagcaaatacatccggatctactgaacgaaaaccatgcttggcaaaaatacgctgtgcatctggtgtacgcagatatgcgacaaaagcttccgcaagttcacgattcccatgtttatcggcatatttattcaccacaactgccgggttctcaatcaggatcgtattcttcggaatgacgatgtcataatctacacctttggcgatccgggcaagcaattcattttcatatgtgacgatgacatcacccacaccatattcgaatgccgccatcgaagaacgcccactcttgtccaatgattcaacgttacgatgtacctgttcgagaaaagccttggctgcggcaggatctttcttcccctcttgctcctccgacagtttcaatccggcaccataaatggcattaatgtcccattgtgcgcctccggatgtctttggattggggtacagtacctttactcctggcttggttaagtcctgaaaatcacgaataccgagcgggttgcccgctcttgtgcccagaacaacaattgaacgggtgatcatgccctcattaggggtctgtttccaatcagagctaaccagatcggctttgaccaacttctcgatatcactctccatcgcgagcaaggctacatcagcctcgaatccaccaacgatggctcttgcctgtgtgcccgaagcttcataggactcttgaaagttaatcgtctgtccggtttttgccttccactcctcttggaacttgggcagcaattcgcctacagcatctttcgctacactataagcaccaatcaccagcgtattggatgaatcgttaccagaggactcgttctgttcgcttgactcctcctgcttgctgcatccagcggtcatgcagacgagcagaagcatgagggcaacatataagagtatggctttcttcttcctcgtctgcatgggcagcccctttcttccacttgatctaaatcatcaccggcatcggatcttccttcagtcggttctcaaccacccaactgttggagtcattgaacaggtatgcacggtgtacaaggactcgaatttgttgaccgatctccaatgtcgttttctccagggaacgatatgtgattaacttatgaccctgtacatccacctctaccatccattcactaccgcggaaatgaagatgtttgactgtacctttttccgttgcagacaacatggtgaactcgttcttcaagccgatctcaatatactccggtcgaatcaacgctttggtatgttcaccctcgacggcatgttcgaatcctttcaactgggaggcatcctccacaaccgtagactccccgataaatgtagcgacaaacggtgtctgcgggtttttgtagatatcccaaggtgtgcccttctgttccagacgaccctgactgataatcatgatttcgtccgccacttcaatcgcttcatcctggtcatgcgttacaaaaatcgaagtgattcccactcgctcaatcaactcacgcaaccatgaacgcagttcctgacggatcttggcatcaatggccgcgaacggttcgtccagcaataacagctgtggctcaggggcgagtgctctggcaaaagcaacacgttgacgctgcccaccagataactgatgtggatagcgctgttcgaaaccttttaacccggtcagttcaaccagttccatcacccgatcacggatctgggcttttggcgtcttcttgaccttgagtccaaaggcgatattctcaaataccgtcatatgtttgaacaaggcatagttctggaatacaaatccgatgccccgctcctgtggaggcagatggttcacgacttttccgtgaaagcgaatctccccggaacccggattctccagacccgcaagcatccgcagaatggacgttttcccgcctccgctgggtccaagcagaccgatcagatggcctttggcaatatcgaatgagacatcttttaccgcatgaaaatcaccgaaatgtttgttcagatcacggacttctacatgcatatcaatgcacttcctttcgcttcttggcccattccatcatgagcagcagcccgacggagaaggtaaccagcaccaatgccacaccatttgcggcagccacattaaaattctcaacatcctgatacaccaaggttgttgctgtctgcgttttgttcataatattcccggatacaaccagcactgcaccgaactccccaagcgagcgcgcaaccgtcaagactagaccatacactaccgcccagcggatcgaaggccatgtcacactccagaacgttctccagccgtaggcgccaagtgtagatgccgcctcctcttgctgagaaccgagttcctggaggacaggcataacctctctgaccatcagtggaaaggtaacaaataacgttgcgatcaccatacccgggaaggcatagaccacattgaatccaatcccttcaaaaaaagcgcccataatgctgttaggtcccaacatcaacacaatcatcaagccgccaatgacaggagatacggcataaggcaggtctacaatactgttcagcagcccttttatccgttcactcagccatccggcacgaaccagatacagagccatcatgatgccaaacaatgtatttaacagggtgaccaccagtaccaccagtccggtcatcatcaaggcatgtaacgcctcaggacgcattaaccctttcaggaatccacctgccccgtcttcaaatgcgccaataaaaatgcgtccaagcgggatgatcagcagtacaataaataccgcaaacgtcagtccgattaacagtcgtctcatcgtcttctcccccgcatctgcaccagattgatcagccagaggatcaggaaggagagcgtcaggagcaacacggatacagcagcagcccccgttggattatcactttcaatctccccgtagataaatacggaagcggtcagtgttctgcccggaatgttaccagccaccagcacgacagccccgaattcagccagtcctctggagaaagccagcatccccccactgatcatgccaggtgccatagaaggcagaataacctgcatgaacgtgcgagccttggatgcccccatcgtgtacgaggcctcttcctcggaaggatcgatttcttccagcaaaggctgcactgcacggataacaaacggaaacgtgacaaaggtcatcgcgataacaatggcgggctggtgaaatacaatctcaaatcccatggattctgccagtttcccgatggcactgaccggacccaaaagtagcataatcatcaagccgcccaccgctgttggcagtgcaaacgggagatcaaccagactattgagaaacgatcggcccacaaagcgataccttgtcaacacccaggcgatcatcgtgcccaaaaccacattaatcagcgtggcaatgacggccagccgaatggtcagcagtacggctttccacgcgatggggtccataatgctctgaacaaagttgctccatccttcagagaaggaattgacgtacacaccgatgattggaagtacaataagtacgataaaatataacaatacggtactgcggaatccccaagtccatcccttatgacgaagaacggtattcattgctgcgttccctcccagcctccggctttagctccggtcggcagtcttcctggctttaatacgacatttttcctaagttggatgatattactttaatattattcccattagtctacttggttttgcttttctgatactttaccagtttgcagtgctaatcgtcaatgcttttattgaatataattgggcctcatatgagaacgattaataaaaatcgtactgtacactgcgcggccagaacaaccttccgatcactgttatcccgagatttctttcatccccttttttaaggggaaatccggtgataaaggcgaagcttatgcttccgaagcagctttcctacagaaagcttttagcttccgcttcttcaggttatttctgacctctccgttattgtgcgattcacatatccgtcttcatatgtggtttgtttggtatgtagtggttaaggtacaatcgagggtaagaacagagatgataaggagtgatctaacatgttatatacgaagaatatatccacttccacacgagacgaaatgaaggatatcacatgggaagtgaagcaggttgtccagagtagcggggtgcagaatgggacggtgctcatctactgtccacatacgacggcaggtattgccatcaacgaaaatgctgacccggatgtgaaacacgatgtattgttacgccttgacgaagtgtacccttgggagcatcccgagtatcgacatgccgaaggtaatacagcctctcacctcaaatcgatcacaacagggccgtcacagacggtaattattcacgaaggcaggctgctgcttggccgctggcaaggcatttacttttgcgaattcgatggaccacgtgagcgggagtattttctcaaaatcatggaagggtagttgggtccaataggcctgccacctactcgttcatttttgcaaacacaaacaggcggtccaccctcattccgggtcggagccgcctgacttggtctgctgcgtttactaactttcgcgagacaacgttataaagaattaaagttatgacaaatcaccgccctgaagtgtaggggtgcaacaacagcgccattattggtcgccaggctgctgacccagattgcggcacagcactttgacatgagacagcgcagacgattcaatctccacaaacgttaaacggtcctgaatgtaataagaaatgaatccgtgcatagccaaaaatagcgtacgcggtaccctttgaatatcctcttccgtacagttcgcttcattcatatactgccttataatcgatgcaaacaattcgaagcaacgtccctgttcggtacgacaataagacaacagttcttcgtccctgatcataaacataatttcgtattggtatggattctccagaccaaagcgaataaactccatcataatgtgctctaccttgctcacatcatcacgaactggcctgaccatggcttgcagcagcaaatgccccagatgattaaaatcttcaaccacgatggcatagaacagctctgccttttccttaaagtgataatacagcgacccatgactatagcccagatgctggccgatgcttcgcatcgaaatggcgcggtatcctttggtaataaaaaggtgcctcgccgcctccagtatccgctccctcgacaactcctgttcgactgctcttctagccatatattttattccccttcaataaaataaagccgctgtccctccgtgatccgggattgcccttgcgtcaaatccgtgatccaggctataaaagcctcggtttcactatccggcggaagacaagtcaacgtaaccttatcggtgaatccagtttcacctgtacggacttcccggcttcttaactcattttccactttacccagccacgtataatccagttcaacaaacacttcacgatgcagcacgttggtaatggcttctccggcttcaatggctgctacagctccatccgtataagcacgaattaacccgccagctccaagcataattcccccgaagtatcgcgtaaccacaattgccacattttttaatttctgatttttgatcacttcaagaatgggtttccctgctgttccgctgggttcaccgtcatcggattgcttctggatctcgtcccgctccccaatcatgtatgcagagcagttatgagttgcattccaatgttttttcttgatctcatcaatgaaggcaacagcctcttcttctgtcgtgaccggcataatatgaccgataaatcgcgacttcttgattacaatttccagattgcccggtcctcgaaccgtgcgataacgttcaatcatcctaaatccaactttctgatcttttcctgagtccattttacaagaaagcagttcaccgcgcgaacgcggacgaactgccctggttatctaaatccgggaaccctgcctcttacacgaacagtgattcccggttagatttacattaccttattcaactatatgagcagaccgatgaattattcggaaagtctcgcttcgagcgctgctttctcttcttcaaagcctggtttgcccagcaatgcgaacatatttttcttgtaagcttccactcctggttggtcaaatggattgacgcccagcaggtagccactaataccgcatgctttttcaaagaagtataccagatatccgaaagaatatggagtcatatctggaatgttcacaatcaggtttggtacttgaccatccgtatgtgcaagcagtgttccttggaacgcttttttgttaacaaagtccatagtttttccttcaaggaagttcaaaccatccagatcgtccggatcggatttgattgagatatgctcagcaacttcagtaacctggataacagtttcgaagatattccggctaccttcctggatgaattgacccatggagtgcaagtctgtagagaaatcaacggatgcaggatagatccctttgtagtctttaccttcactctctccaaacagttgtttccaccactcggatacgaagtgcagggatggctcatagtttacaaggatctcagtgcctttgcctttgcgatacaatgcgttacgaactgcagcatattgatatgcttcattctcagctacattcgggttgctgtattctttggatgcgtcagccgcaccttgcatcatttcttcgatgctgatacccgctgctgcgataggcagcaaacctacagctgtcagaacggagtaacgtccacctacatcatccgggataatgaaagattcgtatccttctgcatttgccagttctttcaatgcaccgcgcgctttgtctgttgtagcatagatgcgtttgcgtgcttcttctttaccatatttctcttccagtgctgcacggaagatacggaaagcaattgccggctctgttgttgtacctgatttggagataacgttaacggagaaatctttgccttcaaccagatccagcaaatgagttacatatgtggagctgatattgtttcctgcaaaatagatttcaggcgttttgcgtttgtcttttggcaaattgttatagaaagagtgagtcagcatttcgatcgctgcacgtgcacccaggtatgatccaccgataccgataacgatcagtacttcggagtcgctttggattttggcagccgctttttgaatgcgggcgaactcttctttgtcataagccgttggcaggtcaatccagcccaggtaatcggagcctgttcctgttccgttgtgaagctgctcgtgagccagacgaatcggttctgcgaaataatccacttcgtgctgatttacaaattgcaatgccgtgctatagtcaaatgtcactttttttgccatgatctcaaaaacctcctgatttcgattatagtgcgtgttcaaactttgtaatcaaaagcggactttttgaacaacctcttatattatgtccgtattccattctaaacaacttgccttaaggatacttcaaatccacggggctgacaagcttgcagctcgaactttgtcgttagaattcaagaagcaaaaagggtaaaccgaatccgcgggttgcggttctgcttacccttcttatgttattccgccgggtacgagcagacgtagtcagtaacgctgcgtatctccagtttaaatttggattcggcaggcacgtggaacgtagcttggccttgaatctcttgccactcttcttctccgggaagcaatactttcagatctccggacagaatctccataatttcacgggaatccgtaccgaactcataactgcctggaagcatgatgcccagagtcactttgctgccatcccccaaaataaccgttctgctggttacctgaccatcataataaatgttggcctctttcactacactgacttgatcgaattgtgacatgcgtacccgctcccctgaagttaatgaaaacaaaaggcaaaacagatcagggcgataacgagttaccgcccatgctctgcggaaataacttactgccatggatcaggacagcatgatgccctcccaaccatagcagcgcttatgaagctattacagcaatgcttttacgcggctaaccacgttatccactgtaaagccatactcttggataacacggtcgccaggcgcggatgcaccaaatgtgctgattccgagaatgtcaccttgatctccaacatatttctcccagcccattggataagccatttcaattgcaagacgagctttaacatccggaagaagaacggactctttgtaagctttgtcttgtttctcgaacagatcccaacttggcatgctgattacgcgaacttggatgccttgttctgcaagtgctgcttgagctttaacagccaattgcacttcagaacctgtagcgataatttgtgctaccgctttgccatcttttgcatcagagacaacataagcaccacgtttcacgttctcacgtgaaccttcaaccgtaccttccaggatcggcaggttttgacgagtgagtacgagtgcaaccgggttgctcttgttctcaagcgcgtaagcccaagcagccgaagtttcattaccatcagccggacgaataaccgtcaggttaggaatgatacgcagggatgccaattgctcgatcggttcgtgcgtaggaccgtcttcaccaacagcgatactgtcgtgagtcagaacatacgttacaggcaatcccatcagggcagccagacgaacagccggacgcaggtaatcggtaaatacgaagaacgtacctccgaatactttcacaccgctgtgcagtgccataccgttcattgctccagccataccgaattcacggataccgaagtagatgttacggccggagtaatcttcaggtgtgaagttctccaggttgttcaagtgagtcattgtggagctttccaagtcagcagatccacctgtcagttgtggcacgttgtgcgccagaccgttcagagcgttaccggatgctacacgagtggaaagagctttgtctgttgctgcatatttaggaagatcacggtcccaaccttctggaaggtcgccgttaatcgctgtttcgaattgagctgccagctcagggaaggcttttttgtactcggcaaatttctcatcccaagctttgttagcagagataccacgatctttcacttgtgcaaagtgatcgcgaacttcagctggtacgtggaagttttcttcgtaaacccatttataatactctttagtcaatttggcttcgtctgcacccagtggagatccgtgagtaccgccgtgaccgcctttaccttgtttgttcgggctaccataaccgataaccgttttaacttcgatcagtgtaggacgcagtgtatctgcttgaccttcctgaattgctttttcgattgcaggcagatcgttaccatcttcaacgcgcagcacttgccagccataagcttcaaaacgcttcgcgatgctttcggaagaagacagatccaatttaccatccaacgtgatgtcattggagtcgaacaacatgatcagtttgcccaggtgcaaacgtccagccagggaagctgattcatgagatacgccttccatcaagtcgccatcaccacagattgcgtaagtgtagtggtcaactacgttgaatttgtctttattgtatgttgcgcccagttgagcttcagccatcgccatacctacagccattgcaataccttgacccagtgggcctgtagttgcatcaacacctgcagtatgtccgaattccgggtgacccggagttttgcttccccattgacggaactgtttcagttcttccattggaagatcatatccgctcaggtgcagcaagctgtacagcaacatggagccatgtcctgcagacaggacaaaacggtcccggttaacccaagttgggtggtccgggttatgagtcatcgtttttgcaaaaagttggtaccccattggagcggagcccatcggcatacccggatgtccggaatttgccttctcaattgcatcaatcgccaaagtacgtacggtagtaatcgacaggttgtcgattgtagtgttctcgtccttttgaatcgcttcgttcttgtcagtcatggtttgtcctcctcatgtctttagataagtcgggtgcgcaagcgaatccctctcatcatacaagcaaaccgaatttcacaataagtgaatccgcttgagtgtttcattttgacttattcacttttgtattgtatcacttggcgtgaagcttttccataaccttcttttagaagttcgtgaaaaatcggtggtttgtgatgaatattccttggcctatcaagcaaaaatcgtactgtacaaggtactaaattccaaaagtagacttaaggagcctcgcaaatccatcgcatgaagtataacctttaacctgaaaaccatgcattttttagatattcatcctcaattcacatataatgttccttaatatggattacgaaattcgggctgtgctttacttttttatagatgtacacgtgtcaatcataggaggtcgcgatcatgccagatcctgctgctcacccatccccatccgtaaaacaatcattaccctggatatccggtattttaactggaattctctcgggagttgtcctgggatttttcctcaaaatgattcaggccaacacaggtgaacaagtatataccctgctgctgaatattgattttgtgcctggtcttccaccaaccttacccgaaatcattgaattttctctgcatctaatcgtgtccgttgtcatcggtatcttctatctgtggtgggtaaggcattcaggccgccctatgatcaaaggaattttacttggtgcagtctcgtccctgctctatatcccactctctcaaatgtcatcacgtgtgccagacctgtacgatctgtccgccatcctctactggattgtaggacatctgctattcggtattgtgcttggcttgtgcggaaagtatatcaacacaacaaaaaaagcgactcccgtttcgtaaacgaattggggtcgctttattgttagtctattacgtggttccgaatcaaccttgcacagtattaaagcgtgagcttaaaatacaacggttttattttcgtgaacaagaacacggtcttcgacatgccatttcacggcacgtgcgagcacaacacgctcaatggtacgtccaatacgtttcagctcggttacatcgtccccgtggcttacacgctgcacatcctgttcaataatcgggccgccatccagttcttccgtaacatagtgcgctgtcgcaccgataattttaacaccgcggttgtacgcctgcgcatacggtttaccacccacgaaggctggcaggaacgaatggtgaatattaatgattcgattgcggtaatgctcaatgaacatcggagagataatctgcatgtaacgagccagaatgatcacatccacatcgttgccgatgacgtccagttggcgctgttccgcttcttttttcgtatctgcagtaactgggatatgatgatatggaatgccaaatgattctacatagtccttcatgtccagatggttgctgaccacaagcgcaatatctgcatccaggtcgcctgcctgccattgccacaacaattcaaccagacagtgatcttctttggatacaaagatagccagtttcttcttgcggctgaccgcagataacgtccattccatctggaaacgacttgccacttctgcaaaatcagcttccagtttcggtaaattgaccaacaattgcggaagatcaaactcaatgcgcataaagaacatgccgccagcagggtccattgtgtactggtccgactgaacaatgtttgcaccatgctggtgcaggaaatgagatacggcagctacaattcctggaccatccggacaggaaataagcatgcgcgcacgatcggcgcggtttttagaatcagggcgtacttgtttagcgtggatctccatcgggttattcttcctccttcaattaagccatgacctgcgggattaacccgcaagccatgcaatcaagcgatgattcagttgttcttcattcaaatgcgggaacaaagcagcttcagtcaccatgtcatagagacgttccagcggttcgcgcggatctgcctttttggctttagcatcatttttgagcaacgtccacacatccagaatatacgaacgagactcaatctctttacctttgaaaaagtgttgcaactgttctacttctgtcaggaattcctggccgaatcgaccggcaacatccccacgaagcagcgcaatctccacctcatacattggacgctgtgtcttagactctttaccaatccaaggtgtctccagaataaatggacgtccttgaagcttctcatggttgacaatgcggttaatcgcctcaaacccgatccagccagagccaattggtgtatgacggtccttgtgcgcacccacagcattcttactatcattaatatgcattacggcaatgcggtcaagtcctaccgtacgatcgaattgttccagcacaccgtcaatatcgttaacaatatcgtatccggcatcatgaatgtgacatgtatccatacacacagtcaggcgctcgttatacgttactttctcaatgatctgggcgatctcttcgaaactgcgacccatctccgtacctttgccagccatggtctccagagcgatgttcacatccgtgtctttcacaccctccagcacttcattcaacccttctgcgatccgtccgatcccatagtgggcatctttgtctgtaaatgcgccgggatgtaatacgatgtttttcacaccaatggcatgtgtacgacgaatctcctcctgaaggaaatctacagccagtctaaacgtgttatctttgtatgagccaagattaacaatatatggtgcatggacaacgatatcttccattccaccctcttgcatggcaagtttgccttcttcaatatacatggactcaattggcttgcgacgtgtattctgtggtgcacccgtatatatcataaacgaactggaaccgtacgaggacgcttccttcgttgcactcaataatcccttgtccgaaaaggacacgtgggagccgattttcagcattattgatcccccttattctgaattatcccttattctaacgcgattatcgaaataaatctagaaatgcgctataattcgggatagaggctatttttgacagctaatatgtggaacatgggtaggcggaatccgtctttccgtgaaaatcaatgaaccgaggtgactccgcaatgattttcgactcctacgcgataatactgaacagctattcccccagcaattggtttatgaatacgatcgcattctggacttttttattgctaggcagcatgtgtatcggtggatttttcatgatgcgcaagtttttgaaagtgctaccaaaagcagacggaaagtccaaactggattggcagaattattgggttgaagccagccgtcacttatggacagatgaagccaaagcttttttggatcaacttgtggagcctgtgcctgggccatttcgtgacatcgccaaacattccattgctgcagagatcggtaagattgcagttgaagacaatgccacggaagtatcgagagatcattgcatcaaaggatacattattgccacaccaaagcgggataataagtttttggtaaaatttttggagaaaaaaaaaatcgattattctccttatcaacatttgattaaataaaataaaagatgagttaagtggcatatagatttggttaattagatacagatatgctccgtcaggtaagttattcccaacaggcagtgcttaccgtacggggctgtttgtcgatccaacggtatatctcagcgcagtgaaaatacagagaggatgtttgatatgaaaatcgccatttgtggaggtaccggatttgtgggaggagcacttgtagattactggctgcaagccgggcaccatgtgaaagttattacacgaaaactgcctgacttgcatactccaagtaaaaatcttacatatatatcgtgggaacaagtcgaagaacaacctcacttgcttgaaggtatggacgctctcgttaaccttgccggagaaacgctgaatcaacgttggacaaccaaggcgaagctggagattgttgaatccagagtcacgaccgtagcgcgggtagcccgattggtagaatccctggaacaaaagccggaagtggtcgttcaggcttctgccatggccatctatggaacctctcctaacgaaacctttgacgaaagcagtccccaaaaatcaatgaatttcccgtcccgagtctcggaacaatgggaagttgctgcagatgcaatcaaaaatgtaagactcgttaaaatccgggtaagtcttgttcttggacataaaagaggtgcgtttccattgatgaaacttccttatatgctgggtgttggtggcaagatcggcagtggcaagcaatggactagctggattcacattatggatatcgtaagactcattgattttagtattcaaaataaacaagtgtcaggtccggtcaatgcttcctcaccaaatcccgttaccaatgatgaattcggtcgtacggtcggtaaagtgtatcatcgccctcactggttccccgtacccagcttcttaattaaaaccttagttggtgaactatccgttgtcgtgcttcaagggcagagagtcattccgcaaaaagctctcgaccacggattccagttcaccttcccaaccttaacccaggcactggaagatctgaaacaccgcggcttatctgactgattgaactatgtcttatccaaccgaccgataagtgtagactgattccgcaagtgtaaatgtgtctccatccgccaatggatactccttatacggagcaagaatattgccctgaagaatggttccattgacggaacccagatccttaatcacatagcccgatttgttccggctcaattccacatgagcacgggacacgccggtcgctgtgtccacccactgaaccatgtctgctgatcttccgatgacaaaagatgctccttgcacatccatccgttcattttggtcactgcttccagatcttcgttcaagataataagacgccatcaccgggcccgcccctgtaaaattacctccactcagattctgcaaatttacggttgcctccgcaactgcatcctgtcgaattagctctgaagttgaagctaccgtttccacatggcgctgaacgagcggtggttcggagtgttcaggtgtcatgtgcagactttgataacgggaatgctcgctaccaccttctgaggcggatacaatcgtttggtttatgcgttcctctttcctatcagctgtattccagcgccaactttcctgaaattgttcctcttcatcttccgtttgcttacctttgttcttacctaaattgaatgaaaaagaccgcttattctctgagtcattatgagggcttgccttgcgcttccacgtccatcctgctacaccaaacaagccaaggcttagtaccatgcacaggatcatctgcgtctgtcctggttgctccatgtatataaatctccataccaatgccatggcaaccatgcagcccagtatgatataggttactttggaagatccgggcttctcctccacttccatatcaacacgatctaacgaatcgtacgggttacttcctctcttatccatgctgtttgagctctctaatgaagattgctcaggtgagcgcctgcctggaaagcttcgagatctcagcggaatgtcttcaacctcagattcactcttattgtgcggctgacggaaatttagttgcggccccacaggagcattttgaaagggagcaccggattgatatggccgagaagtacctgtggctagcctgctatctcgctcagaaatcgacgaatgaagatcacctcttgaatcattgggtgtttccgaagttctggacgagagaaatgctgcgcctcctccattctcttgctcgtcagcgtataattccagcagaagctctcgcaactgtctgatatcccagcgttcgttgtcacataactgcagaacacgctgaataccttctccctgcagttcctgtacatgtgccatcagcctgataaccagctcacggaattgctgaggcattggatcaacctcaactgtatccatgattggtacatataccatcccaagctcaccctgttcgaatgaaccgttgatgaacaagtactcttcctggatcattaatttacggggctccaacatatactgtcggcattccgtgaaggcatcagctagttggaacaacaaaccatacagaacacgcaacttgattttgcttgactttaacatctgagataacatcttgtaccctgatatgtcgtactgcaaagttacatttcgatcgacttcccgaatatgaacaggaagaagtcgcggaatctgattggaggacaacatccccatctgtacccggcttaattcctccattcgtaacccttctgctttttccaaaaccatgaacgctccgccgttacgaataaaatctctcgttaatccatacatgccaatcctctctttccattgttattctcaaatttttctacttcttcacttaagggaaaagtcccgggataaagaccgtgataaatccaggtaacaccgccagcataaacggaaacttcaatgtcttctctgtgttaaacagcttgagggaaccaagcatgaagaatccggcaagattgcctgccatgcctcgaatccgtttcgctgagtccttgcggaatagaagtatcactaaaccaatggcgcccgcgtacaaaacggagtaaataatgacatgaatgccaaaagcaagtcccgtccatgcgccaatcccaccaaacaatttcacatctcctgcccctacggctccaatcgcatacatcagaaacaaaatgccaaaacctgctgcaaatccagcggctgagaacaagaaaccatcccaacctccccatatgatgtgggccaatacgcctgcaacagtcacgggtaaagtcaatcgatttggaattttcatggaacgaatatctgtaataaaagctgcaatgacgtatatgccacaggcaatgtaaaaccactccacctccatcatctcctcatttattttctggaggccacgttaaacgtagtctccgtcttggcaccgtcccctgtctcgacaacaaaactccaagtcccttctgttgtccgagtaccaacaaaccagttccattcaataattccattctcatctgcggtagcccagccgatgtgcttcgcagaactttcacctgacttgtaaaatatcgttaagttggctgtcgctcctggttctaccttcaccttgatcgttgcattgttgcctatgtatgccgggtcaggcttcgacagtaccgttgctgaacccgcagtatccccgtctcctgcgctgccatctgatccttctccggtatctccaatccatacccgttctgccgcagcagcctgaatccgaagtggtttactgagaaaggggacttttataggcaattcataactcagttcaagtcggaaatatggatttgttttgtttttgagatctggtatcgaaataccattcacatgaacacgttccatattaagcagcgttggctcgataaaaggttgaagcagcggttttaccgtgggatcaagtacggtttccaagacggatgttttgatctcctgtagtggctgttcaccactggccgccgctgaacgtacccaatcacttaaaggctcgggtagagaagaagcataaccttctgcccattccgtcagtgataactccggtatcttccagccccctcctgaaccttctccgccagcagaatcagaaggtgtgaatgcaagggaaacgggatatattttcgttgataattgctttactgcttcccctgccgtgctctgtagcgctgtggagattagagtcatttgcactatgaagatgagaaacatgataaagaatagaaagacaggtaacaccagtgaagcttccagaaccatgctaccctgttccttttttggagaacatatctgctttttgagagacttcaaacgctgcaatctgattattcgtgttaaacgaatctgcttttgtgcgctttctttttcataatgttgctgcttatccataatccctccaccgaaacgatcctaattattcaataggaataatccgccttccgctcaatgaaaaatcgcccatcttcaacctgatcctcactacccataactgcacctatgcttctaaccacccctggtaaaaaccacagtttgatgctactacgcatgttacccgcagcatacgtctgtttctcatctggattcacacccgtattcaatcgaattagcgccagcattctggacattttgcgttcattgttgctatgcatcaataggaacaatcggagatggtccctgtacgtcagtttgactttgatatacttggacaattccacactgccctcttttgctagtttcaccatatccgcgatggcgtttgtaatcccgtataagatggccgccgataataccagaagtgggttcccaagcttgctgtgctcaattaacccttctgccgtccgaatagccagccgcattccaaatatctccgcatatgccgcagcgatattacccgaaggattatgaaacccataaacgatatactccagttcctgattctccagtttgaaaacatcaccagcatctccaccaccttcagtccaggtaaataactgaccaaaatccatggagttaaaataggctaaagcatattcattctgaaataattcgtcgccaagactgtccaacagaccggacatcccgccaaacaaactgtccattcccttcatggcatcgccaccagagtcatagggatctccagcaatctctgcctttttgccttcctcacgactagcctcgttaaaagaaatattagcgttgtaatattcctccaactgtttgaaagcgtccatggaccccgaacttccattctgaatctgcgacaagattcgtttgacttccttcaatttccctttggattctttgtcatttgctttgcgctgggcatcggacccacgaccactctccagctgctgcttactttgcaggatgagattggcaggaccgctacgtacataagtgtccatatatcgttccgtaacctgacttgcctgtctaaccgccggtttaatcggaacaccactcagggccgtgacactgcgaagctgtgtattcaattccatgttgtctcttctgacgttagagaagtccgaattctgggaaacaacccgtgccttcaactgatcaaataggctatctgccctcacaagctccgaagcaagagaacgtgtgcttttagcttcactgcctgatccagtagatgcaggactcgtcccaggcaaattcgagttgccgacgttgtcatagctcgcattctgcgaacggttctccccctccgcgatcacacgtttcatttcatcattaatcttgcgcgcttcttcgatcttggactgtgcttcctccagctttgtttgatgggcctgtaacgccggttgtatgatcatgctgatgcctgtcaccacattaccaacaccagtccgataacgagccagttccaatatgtattgttgctctctgaacggcagtccctcatctgcctgtttcttgttcagataatctgcataacgtgccgccgcctcggcagctgtctctggtgtttcttccaacatttcttcatagatggcttgtgaaggcgggtccatgatcaacttcggaagattcttcagtttctccgcggattccgtctgattggcaatggcttcatccagtaattcttcacgtttgtcatataacttctgtaattttttcagcaagtctaccgtgtgcgcggcttccttcatctcgtctgatatcggtttgaaccgattgatcacttcaagggtaaaatcaaccggagcccgatacttcatatcctcctgaatctggcgattaaatatatcgtatctgcccagttcacgctccatgctcagcgaagttgtatcccactggatatccagaatgggaaatccatcttttacagctgaaggcttcacactatcattcaacactttagccataatcgcatccccactactgtccccatacccgaataaaccatactcccggagtgatgtgtcataggctgacatgacggatctcatcgcagcatgtgtcatgcgttcggtctgcaccttgaatgccgctatacgagcgtaatcaataaatatagcgacaaacatataaactccggccaatattaatattaaaaaaagggttacggctcccaattcaccgtctttttttctaaacagctccgccctcctccttttctcactttttgcttttgccaaaatgctgcacaacctgtccggcttccgctgcagtactcgcggtttcaccgcctttgcctttaaacttggctgcgtaataacggaccagatcgaccgttcgaatgaattcaaccggttcaacaactgcggacgatccttgagtgaggacacggttacctgaatcgaacaaaaaagaaggaagaggcaaagaaattacttgttccagcttggttgttactttccgctgaatcagagaattctgatactcaatcgttcctttcatagctgagggcatatgttgcaccgcttgtgctaatttctgttccgagagatttccgcctccaccagcaggtatagaaacgctaacctgattctccgctcccgcccagccaaacagcgcgccaagcatacgatcatccgtcagtctccagtacagattgtcatgttctccagcgacaaattcacccgtcatcgcctgcttgtggctgttgtcccagctataggccgcacgttcggaagctgcataggcgtgttgattcaagaatgtcttttgatacatgtacatggtgaagaagagtaataacacaagaataaacagcacaacagggaagatcagggaagcttcaacggtgaagctcccttcttccttcttcagcctgttaacccgggaaaaattcattactttttgtatccacttttttaagaaggtctcctactaatttttcaatttccttcctgaataacaacgcaataatgataataaccccgataatcagaatcatttccaacgtgccaagtccgtcctcttccttccaaaatgcgtttaccttgttcttcaatacttccatcatcccaattcctcctacatattcatcatcataaaagcaggtgccccgatcatgaccacaatcgtaaaaaagatcagtaccatcggaaacaccagtttggaagaagcctgttctcccttcgcccgactgacagccttgcgtttctcccacaacacatgtgacagatcccgcagcgccaatacaaagtcacctcccccacgccggaaattcagcagtaccgttgtcgtaaaaatcgtcacttcttgtacaccgcagcggcgactgaactgttcaaatgattgttgaaacgagtaaccattattccagtctcccaccgtctttctgagttcgttgtaaagcggatgtttccgttccccctggcttgtcacacagtgaacgatggcacgttgcacggtctcccctgcgccaaccagcagtacaattcggttcagcagctcaggcagttccataagaatatcctggtctcttcgctgcacctttgtattgaggtctttgtagagcgcaaaaggcaacgctgcaccgagcgcgagcccacccaccatacctccgatgcccatatctccaacgagtgataacaggcagcccaccagcagcatgagccatgtataggtcaacatttcagcgcaatacagcatcgttttctctccactgtgctgtatgccgtacattttctgaatggcatgttgcattcgaaacatgagcactggcaatcggcgtccaatctcgaacttgtccaatataaacaggaaggggccatgtaattttttcagtcgtaatccttccatatccagcttgcgcagatgccggtaggtctgtccccgggttcgatccagcaccagccatcccgctccaagcatccctgcgactataacgggaagcagcatcgtttcagctccttacactttgatatccataatgcgagtaacccacagataacagcaggcgagtactgccaaggcaccactagagatgaggtaccccatcccactatataacggctccataaagtccttggcggtcagattgaggaatatcagaaaaataaatggagcggcaaacatcacttttgattcgaactttttctgcgataccgcgaccataatatcctgctgaatgtccagcttctcaccaatcaccgcagaggtacgacgcacaacctcaaccagatccccgccagttcgtttgcacgtaatgaacacatctgcaaaattcgtaatatcttcaatctgcgcccgatctgcaaaatcctgtagcgcctcttcaatcggttgcccatactccatccgtgtccgcaatatcgtgaactcacgaatcagatcggtatccgcttccgggttcaacatccgcagatcctccacggattccttgaatccattttccaccgattttcctgcggccagtgccgaagataatgcatataacgcttgcttaaaatgtaaactgagtgtcattctttttcgttccaacagcactttagtccaatgttttggtacccatatgcaacccgcagccaggatcgctccagccaaccagtgatggtagaacagaattccgatgccaaaaaacagcagaccactaatcagcatacagaccattcgttgtctccgggaaagcgcatatacggtgtaatccgtcaacatctgtctggcttcacccaacagtaatcaccttccaatggctttaattcacgttgttatctgattaatctattccaacactatactgttctatgtattcatccagccatttcccgagcccagccatctgaattttatccacctgattcaactttccaacctgtactaacccgccaataattttgccttcacgctcttcttgttcctggaaacgaaacagtggattcagcataacctcaccgtcctgcatgccaatcacttcactaatctctgtcacccgccgtgaacgatctcgtagccgggacagatgtacaaaaatatcgattgctgaactaatctgctgccttacaaccgcaataggaagatccgcaccgctaagcaccatcgtttcgagtctgctgatcatgtcggaaatcgtgttcgcatgccctgtagacaatgatccatcgtggccagtgttcatggcctgtaacatatccagcgcttctgcgcccctgacttccccaatcacaatccggtttggacgcatccgtaaggaagacttgatcagatcccgaatagatatctgtcccttgccttcggtgtttgcattccgcgtttccagtgataccagatttggtaccgtaactatctgtagctcagctgaatcctcaatggtaataatccgttcatcggcagggatgaactgtgataatgcgttcagaaaggtcgtttttcccgatccggtcccacctccaatgaagatgttgtatttgctccgtaccaactgctgcaataattctgccgcttcttcatgcagggctcccttttcaatcagatcagacatcttcatcggttcactggggaatttacgaatcgtcatcgtgggtcctttcaaggcaataggaggcaacacgatattgacccgcgaaccatcctttaaacgggcatctacgattggagaagactcattcacaatccggtttaccccggacacaatcatctggatgatatcctcgagccgttccctggactcaaattcaagggtgatctggctgacttcaccttcctgctccacaaaaatctccttgtgactattgatcataatttccgtaatatcgggatgatccacaagtggctgcaaaatatccaatccacgaaaggaatcaaacaatcgctgtaccagcgtatgacgctctcctgaggtcagatcatccagcttcgggtctgtgagaactttgcgttctatcccctgccacagttcatcatctcctgcggaagaggttaaatcgaggccagccctgacttccctgcgcatcatctgaaactgttcttcacgatccagtattctattggatgaatccgtcataacgcccaccgatcctgcttctgaattcgtcccgtctgcttcaattcttcttcgccatcttgtaccagcatggcacataatctcttcacttcacgttggaagatcggagaactaagcatgacttcctcctgactgagttgcttccaagaagggatatagggcaacactgcatccagatgcagatcagggcgtggaagtgcattgacgacattgtcccgatatttgttaaccacaaagcgtgaacgatccaacatactttcgtacaaatctggcttcgtacgctcagcatgctgtaaccattgtccccaacgatgcatggcagatatatcatcctcaaccagccagacaaatgcatctgcagtatccaacaccccttcactgcgcccatcccaaccggaatccccatccagaatcagcacgtcatactgtccacaatccgttaaataacgaagcagattcgacgtatcctcacgagtcatttgcaacagttctttccgattcgataatggccagaacacatcggatttcaacgcttcatgccggaccacatatccatctacgcccttcgattgtacctgtaactgcttgccggattcttttctgcccaccttcagatcgtataacaggcgggacaatcccgtctccgcatccgggtgacgctgcccacttctagttagtcccttttccagaaacgggagcgtactgtccagcgtctccagattcagatagagaacagcataacctgcaagtcccaattgcttcgccatatgcagggccactgccgttttgccacttccacccgaagcggatactacaccgatggagagagtctcttgccctggatggtgaaccttcttacggcgtggctgccggcaagcatgcatcacagcatccagcaaagcaggcaagggttgatatttcatcagccgcttggcctcatccacctcttccatcccttcactaagcattagccaaggtacacctgatacctctcccccgttattcagccagtcattcagaaactccggttccgcaataaccagatccggtaattctctaccttcttgctctttcatgtgatccctgaacgaatcctcttgggagaatgccgtgaaacgcacatgaagaccagacggatttccctgtacataatcaagccaggcgctaatgtaatctctatcctttgaaaccagaacaaccttcagtacaatcaatttctccttccctccctgtcaaaaagcacaaaaaagcaccgtccaataaccgcatgaatatgcagtatatggacggtgcttccgtcacgtgctatgaatgtatggataatatagcatacaatttctgggggagcaagggatttattctaaccctttttccttaagagttgtacggtgaatcgaactcaataatgttacggtccggatcaagcacaaaaatctgcgcgaatccagctacactgtcaggtctcgcttcatactcaattccctgctgctccagccaggctatagtctctgaataactggtgacccagatcgcaaagtgaccgtctgtagtatcaatcccagcctcacgtaacgtgtgaccctccgggtgctgaagcagatgaagctgctggctgccgatagcgtaccatgtacccgtggagcggaaggctggacgttcaatctcctgcatgcctaataaccccgagtagaacttcttcgcgatttccagatcacgtacagccagactaacatggtggatgtgtgcatattcaatcatcttttatatccccctctttacttcaatatgactatactataacaccttgaaccctgaccataatctcctctaaacagaaaaacacccctgattctaatccggtaaacctctcggctcacacagatctagttcagaggtgcatgttttattttgcgctatctaatgcttcttgtggaatcttgatctcttccacttgatcgtggttagaaaatgtactgttcatcttcatgtccatcgtcattttctgtccattctgttccatctccatgaccatggttacgtctgtacttgcaggcaggtaggtttctttgttgatcatgtatttcatcttcatgctggtgatattcatctgatcaagcatggcttgcatctgggcatccgatccgttttgctccatcacggctttggccagttccttcacgttatcaccggatacgtcagcgttaatcacataattgtcgccttcttcggtcacttcagtatcttcttcgatctttttgaattgctccaactcaccttcgggattcatgcttgctttcatctgctcaatcagttccttggtttgagcttcaggaatcgcaacccattgatccccaacttgagagtagattttatccgatgtgatatactgcttcacgttctgagcttcctgtcccgacatttccattttcatctcttggtagatcatcattggatctttgatgatatccattttgagcgatgttttaacctgttgatcctgtgactgttcaccagcatccagtttcagattctgatcaatgtttgcttcagttgtgaagcttttcatttctttggttgctgcattcgttttggtaatcaactcatccagggtagggatctttgtttcctgctccgcaggtgtattaccctcgttagatgtttcattgttggtcgctggcggcgttgccgtgttgtctgtgtcgtttccgcatgctgccaagcttactgctaataatgccccgataattaatgtagtccacttcttcaagttgttttcctcccaaaatagatatgatctgtagtcattacccaattatttccgctattaatcatcaaatttggatacaatgtgtcgcacgagactttttcacagaaatcgatctttaatctcaggtgtaggcaacatgcaagcttcatccttgccaaaccagcgataacggttgcgagcaacccagttatagactacattacgaataaatttcggtatgatgatgaacacatataacaacggataaggaaattttagacctttggccaatcgcagtgcggcggttgaacgtgtatagtattttccattttcaatcagcacaaaggtgtccatactatctgtcgacaaattgcctttcttcagcaattccttggctacatccgattgaagcgatgcaaaatgatattttccttccggatcacgcttgataatccatttggttaagccctggcagaagtgacagacgccatccaccagtacgatgggatgtccctgatgcacatctgtttgatttgctgtcatattggctgcctcctattgttgcggttagagtaacttacccaatctgggccttcttgttcactaattctaaatttatttctagaggtagttcaaaaagactgaacaccgctctttttgaacatgcattaatgggaaatataaagaaaaagagcgcaggcattgtgcccacgctcgtatctgtccgacaattactccgtaactgccttttccatccattggtcatcgatcatctgttgatgcaggtcacttgcccactggtccatacatttgcaaatgaaatctttgcgacatactggacaaggcgttttctgcagacggctgatattggtcatcttccattccggggaacgggtgtagaatacacggcattttgtaccgtctaccaaattcattttgaattcatacaatccgtcttccttgttaccataagctaattctaaatctgcaatacgcggtctataagacatggatatcacctgtttaattcaaatttggttcatgcaatgacactactcagtactaagttatattaaagaaaattcagatcaatgtcaactcgcgcatgtctacccgccaaacagaatatccagaatcgtccctacctgtccctgttttttccctttcaagacatccggatcaaatacttcaacatacccgcaggaagcacaagccacgaacaggtagtggttatgctgtatatcaaacatcttgctcaggcctgctcctgacatggaaacttccttaatgttacaatccgtacccctgcattttgtgcacacaaatcgccgctcgatcatctcttcaatactcatcttcgttccccctttatggaatgtgtagcatgaagtgagagtgcaattatgtaaaatagtacgcgatctggcatctaatctcctgcatcatgtccttatatgataatcaacacaaaaccctgccgattgccagcagggctttgtagtcgaacatcaggtatctgggataacctgctctatatgttccctttacttaccaggagtcaaatcttagactacgtttaaaacaacatcaatgttgccacgtgttgctttggaatatggacagaaatcatgcgccttgcgggccaattcctctgcttgactgtgatctacaccaggcatgctaacgtccagacgaacagacagctggaaaccgtcatccgcagggtctttaccaatggatacgttacttgtaacgaccacatcctccaatttcacacctgctttgcgtgctacattggcaagggcactttcataacatgctccatatccagcggcaaaaagttgctcagggttagtaccttcaccaccggagccaccaagctcttttggcatttttagatcatgcttgagcacgccatccgaagaagtcaccgaacctgtacgtccacctttaactgtcgctactgctgtatataaagcttccattcagaatctctcccttatccatatagtttttttactgccttcctttcaatttaaacttctggctcattttgaaacgcaattttgtatctttatcagcttttacaactttattattttcatgcatttcaatgctatggctgtattttccctaaggttgggtaatatacgaaggggcatcttcaagctataaccgaaattttgtgctgatacataaaagttgcactagacaaaaataattgaaggagtacaatgtaacaataaacataaaaatttagatatatcatgagtggtttgtaccgcatcaatatctcaaaatcaataattcaaagtcaggtgattatcgtatgagtaaaaaaaatccgttcaacgctccttcaagagaatcattatctactgcgggcatggccccttcccttggagaagcacatagttccatgaaagttccgcagaatgctgcatggtggaagaaattcctcgcctttgtaggcccaggatacctcgttgccgtaggttacatggaccccgggaactgggcaacagatatcgcaggtggctcgcagttcgggtataccttgttatccgttatcctgttatcgaacctgatggccgttgtccttcagtcgctggctggcaagcttggcatcgtcactggacgggatctggctcaagcctgtcgtgaacgattcagcatgcctgttgttatgatgttatggattctgtgtgagcttgccattgcagctaccgatctggctgaggtcataggttctgccatcgcattaaaactgttatttaacatccccatgttatacggcgttatcatcaccgcagttgatgtactcctgattcttgttctgcaaaacaaaggcttccgcgctttggaaactctcgtcattgtgctgatggcaaccatcgccctctgcttcgggattgatctgtttctggcaaaaccggatatgggcggtgttctccatggttttgtaccaaatgttgagattctgcaaaacccggccatgctctatattgccattggtattatcggagcaaccgtgatgccgcataatctgtacctgcattcttccattgtgcagacccgtcagatcgaacagacaccacagggcaaaaaagaagccattcggtactcgaccatggattctacgattgcgctgacactggccctgttcatcaatgcagccatcctgattgtatctgccgctgtatttcacagtgctggtatgacgcaggttgctgagatcgctgatgcctatcatctgctgacacctctattaggtactacggttgcaagtatcctgttcggtgtggcgctgttagcatcaggtcagaactctacccttacaggtacactcgctgggcagatcgttatggaaggtttcctgaacattcgaattccggcatggctacgcagactggtcacacgtctgatcgccatcatcccggcggtaattgtcacagcgattgcaggagaacatggcacagaagaactactcattttgagccaggtcgtgctgtcacttcaattgccctttgctgtaattcccctggtgatgttcacaagtgataaaaaaagtatgggtgcattcgccaacaaattgtggctcaaaatcatctcatgggtcattacagctattatcgttatgctaaatgtatatctgatcattcagacgatccgcttgttctaatctcattctaatcgactaaatactaaaaaggctgatcaactccggtatgctatacccaagttgatcagcctttattgttgcaatccaataaacaaccatctgaatctaatcctgatttggtatcagtaacggcaagagttgatccaatgaatcaacagtccaatccgcacgtttgtcatccgatagttctggctggaatcttccgtaaccctgcataatccgaatcgtacgcatgcccagcttccgagcaggtataatgtcgttatcgatccgatcgccgatcatgacggcttcctccggttcacaaccggcctgcttcaaggccacagcgtataactcagggtctggcttggacactccttcttcagccgaacatgccagaacatcaacatacttccgcaagccgtagctctccagtctctcttccgttccaggactctgattggcaataatgccaatgcgataatgccgtgacaactgctgaagaacggaatctgctgaaggaaaaggacgttcaagatctttttgaaacttcagcttgtcctgaatctgtttttgatgtccctcgtctttaacaaatgtgcgaattgccactctcataggccattgctcatattttcggtaacagttcgcgaacagttcgcgtaccgtctcaatcttcaccggataccccaaaacacaagcttcacggacgaactgtccaataatatcatcaaccggctcccattcatccaccagtgtatctccaacatcaaaaaacaaccatttcaatccacctacatccggcatgccaattcctccttgtaagcataaaaaagaagactcaccatcatgcatgagtctcctcaaacttccgtttatcgatgaatcaatttcataataccttgagtgaattctgaaattgattctaatacattcaattataacaggcaccttacacctgagcaatcagaagctatggcattagccattgaggagaaagccaacttccccattgagcgaatatacaatccggtctgcgcccatgccccgatagatgcccttaggatgactctgctccgtaatgacgcacagggatttcgatgtccatgaacggcagatctgtaaataacgacaggtcagattcaggctgttctcgaaaataaacacgttgcctacgctgccctgcggcaaaaaccatttttgagctgcagccgtattcatgcgaataacatgttctactccgattctacggagtctgcgctcttcccctgcactgttggttagaacggcaaacggcatttttttgtacatcagcaatttgataaatttgcgtcctgcttcatttggagcagtcactaagatcatctcagtatccatcattcgttcctcccttggcgtgaaaagacaacaaaaaagaagcgtgggggaccaaggcctcccgaacgcttcttaaataacccatggcgaaaacaccatgaaccagcgtacggcttgttgcctctccctttaacgcttacgaggttagctgacggattcgggcgcgagagtcgccctatttccggctgtcaccggaaaattcaccccatgaatgcccactgtcctggacagcgcattccgttggttcccccgttttccactcatcaatgaatggaaactcagcgattaaaacatcgttcgtatatcttaaggataagatcgagcgatattatcgtttgtttcgtttttcaagtacattttagtttaaattgaaattacgttatgaatcatacacccgtgccatgtcggtgtaaagtccgccgagatcaccaaatcggcagatttttgccaattcctatccataataacgcttacaacaaagttatactctatctatctcttcaaggctatctaattctcactctggcgtaaatcacttcgcaattcattcacgtattctgcacaacttgcctgtttttattcttttaacaccatattagttttgcaatatttaattgcaaccaatataatagaagatataagagtaaataaatggaggcgatttagatgacagtctacgattacaaagtgaatacccttcgcggtcaagaagttgaaatgtccgactaccgtgacaaagtgcttctgattgtgaatacggcaagctcatgcggccttacccctcaattcaaaggtctgcaagaattgcaagacaagtttcaagatgctccatttgaagtgcttggtttcccaagcaaccagtttgcacaggaaaaaggatcttccgacgatattgccgagttctgtcagatgaattatggcgtgagcttccccatgtttgagaaaattgatgtgaacggttcaagcgctcaccctcttttccaacacctgagcacagaagctcctggcctgctcggctccaaagcaatcaaatggaatttcaccaaattcctcgtggatcagaacggacaggtcattaaacgttatgctcccaaaacaacaccggacaagattgaagaagatatcaagaatttgctgcaaaaataatacacaggccacccgtagccggaaggtagagcaacattcctccggtaatggatggccttttttcaacccagatgtcatactgttcgaataagacaaaaaaaagaagcttcccattaatggaaagcttctttttaatcgttcatatgatgcggtcgagaggactcgaacctccacgggcatacgcccactaccccctcaagatagcgtgtctgccattccaccacgaccgcatgtcgtaaataatcggcaacagaattgattataccgggttcagaactaaaagtaaagtattttttaatacttctttttcagctaggcattttcatcaaaaatcgcataatctcgtcatctttacccatgaactgcatatgattagatttgatcccctctttttcggtaagagccgatcttgttgattcatttatatatagtccttccttatatatagtcctccatgaacttcaccacataaataacacaataagttatataaaataacacaaatattaaattccagatttaatccattaattttcacggatactattgacaaaaagcggacatttatgggatgataactatcatataattcggatttttaaacataaagcaaacaaaaaggaatataaatgtcactttaagtgacatttaacgaacacaggaggcgaatgattgtgaaccgtgggaataagctgctcgattatgtcaaactgcttgattcctctattcaggttggagggttcacccattccttcggcatggatatccatatcagggagggtaccattcgtaatgctgaagatctcgaatcattcatacgttgtcagttgcatccgagcatcgttcgtcttgaaggtatggctatcaaaggcatctataccgcaacagatcacaaggatacatggcggatagctctgatcgacaagctcgtccatgttcagcgaacccctggagatctcagagaacaagctgccgccatgggtaaacgattgatcagactcgcacgcgctctgcacccctggattgaattcagccagctcgaacagatctttgccaaatatgattcggttggctgcctctccactgttcacgcctggattaaccaccacctcgacatcccggtcgaggaggcggtccttggttacctgcattcagccatgaatgcctgcataaccgaagcctccaaagtcattcccctgaacaacgatacaaccaaggatctgatggtccgcctggccacagatctggagaatgaatggaagaccgtcagcgcctcggctgcggatggactggcacagccaacctcgatgtccatgaaatcgtttttccccagtttccatatgctcggagctggacttcatgcctacagggcctaatcctcttcctcctcatgcctgctccccttcattcaaacaaactaaaaaacacgcggcaacctccttgccgacgtgttttttgtcattttatttgttttatttacgtatttacgccatttataatcacaaaatacacttttttccgtcttttttaattgttagatgacgaatttacgtatataatgaaacatacagctcgcatttctatatattctacatgaagaaagggcggctgaatactacattctaaccaggggtgaacccttttgaacaagaaaaaaccagttactccgttcggatgggccatcaaacgacggctaaccgaacttcaagtggaccagaagaccttttgtgaacagcatggcatcccaccctatcgtttatccaatcttattcacggcacacgcaaagcaacccgattcaggcacctggtcgctgatattttggatattccagatgaactgagataagatttctgccaaaggagggtctcatccatgagacatgttacatccgatctggagaggctgtcgttccagtccatacgtcaccagctcatcatcgttgatgacaattggattatccaaagttgtaaccgtgcctggcaacagggacttggtcaatgctcaccaaacccggatatacacagtagtcatagacactacctgcacctgacggaagcctgggcaaaacgaggcaagaacgctaacatggcacttgtcgcacagaatttgaaagaacgcggaataccctttaatcgaaatcatacatatgacatctgcgtgtatactgtatacaacgaaaagaggtggtttcgtgtagaactcacccctctatcttattcaaattcaattctggataccgatcttgctttaattgcacacatggatattaccgaacagagaaagacagaacaccaattgaagaaggcattgtctgaagtgcgcacattgcgcggactgctgcctatttgcgccgtctgcaaacaaatcaaggacgaagaggaacactggaactccgttgagagttatctggagaagcatacccacgccgaattcacccatgacatctgtccggaatgcatccggcggttatatccgaaatactcgaatatcctggacaagcgctcctgaaacctttctccactcgccgactaactacaactatacggagagatgatgttcaaactgcgacatatccagttcttgcggtgtcccatgcagggttatggttcctttgtccatgatatagatgtaatctgcggcacttcgtacaaaatcaatactctgctctaccagcagaaccgagaggttcccctttgccttgagctgcaaaataacctgccgaatgtcctccacgatagaaggctggatgccttctgtcggctcatcaaggagcaacaaccccggacgcgaagccaatgcccgagcgaacgccaactgttgctgctgtccaccactcagatccccgccctgccgtccatacatcgtagcaagcactggaaacatcgccagtacatcctccgggaacgtttttactcccggtgcacttgtctccagaccaagcaataagttttctttcaccgtaagctgcgggaaaatctcccgcccctgcggtacatacccaatccctgcccttgcccgcttggctgtgtccaaggtggataactcctgattttgccactgaatactgcccttgcgtgttttgagcagccccattaatgttttcatcaacgttgttttccccacaccgttacggcccatcagacacaccacctgtccaggctgtacatccaggttcacaccacgaagcacattgctttccccgtagccggattcaattcgttgcagcgacagcatggtcatccctccttttgcccagatacacttctgccactttcgggtctgcctgtacctccgccatcgtaccttccttcagcagtttcccttcatgcatcaccgttaccttggctgcgaactctcgcacaaactccatatcatgctccaccaccacaaccgagcgttcacgcgcaatctcttgcagaagtcgcccggtcttgtgtgtttcttcatccgtcatgcctgcggctggttcgtccagcaacaacacccgcggctcctgtagaagcaacatgccaatctccagccactgcttctccccatgtgataacgctcctgcacgagcatcaacgcggtcttgcagaccaatctggagggtaacatgctccatggcagcactcattttcccatatctccgaatgccaatggcttgtaaaggggaacggcgagtctccgccgccagcatcagattctcctgtaccgtcagacctgcaaagatcgatggcgcctggaatttgcgtcccacacctttgcgaacaatctggtgctccttcagtcgtgttaattccgtgccatcccccatcttcaccgtgccggacatgggttttgttttgccacatatcacatccagcatcgttgttttcccagcaccattgggtccgattagaaaatgcagatcatgttcatgcaacttcagattcatgcctttgacagcaacgaacccaccaaaggccaccgtaatatccacggctaccaacaccgctgattcctcagtagactttaggtttttcccgagtgacttggacatgcgcactctctcctctccgcttcagcaagcgaacgacatgacgatacacacctacaataccgtttggcatgaacaaaactaccgttacaaagagcccaccaatgacaaacagccacccttcagggtaagcctcacttatgcctgttttggctgcattcagcaccaccgctccgatgaccgctccaataagcgtaccgcgaccacccaacgcaacccacaggaccatctcaatggagggtacaatccccatcatcgatggcgagataatacccacctgaagaacaaacaacatgcccgcgatacctgcaagcgcaccggaaaaagcaaaagccagcgttttatatcctgccggatcatatccgaggaatcgcacccgattctctccatcacgcgctgcttcgagcacctggccgaaccggctgttcaccatccgacgacagagcacatacgcgatcaccagaacagcaagcgttatatagtagagagcaatcgttgttccagcggaatgaagtgtaaaaccaaagatcgaattatatccggtaatgccatttgttccacccgtccattcctgtttaccaacaaagagtgttaccataataagaaccaaagcttgagtcaggatggtaaaataaacaccggtgatccggttgcggaacgtaaaccaccccagagcaaaggcaagcaatgccggaagggctatccccaataacagcgccaccgggaaagagcgaaatggttcccagaaccacggcagaccactgagaccactccatcccatgaagtcaggaagcgttgctccactggcctgaagcttcagatacatcgccatcgcgtacccacccagaccaaagaacaccccatgcccaaggctcagcacacccccatatccccagatcagatcgagaccgatggccaggattgccagtgccaaaaacttggctaacagactcagacgaaactccgtggagattagcggggcaagacacatcatgatcagcacaaccgcccagataattctcattttcagactgccagtcttgaataaagcggacatgaactaaccccctttttcacgttaatcgagactccgtgtgcgcatcgcgaccaagccgcgtggtttccattgcaggaaagcaacgatacatacaaacacaagcaccttgccaatggaggccgaggtataagtttcgaacagcgtgttgaacataccaatccccaatgcaccacacacggttccaaccaattttcccacaccacccaaaacaaccaccatgaacgcatccacaatataatacgtaccaagcgaaggaccaatcggaccaatgagcgttaatgcacagccagcaattccggcaatgcccgaaccaatcgcaaaggtcatgccatccacccgccgggtcgaaatcccaagacaccccgccatgctccgattctgcatcacagccctcattcgtcttccggaagatgttcgatagatatagagatacatacacagcagcaccaccgcaaccagtgcgataatgaaaattcgtttatacggaaatacaataccatccgagatcgccaatcccccattgagccaagccggactggatactcccacattgggtgctccgaatatggtacgggccagttgttgcagcatcatgcctacaccccatgtcgcaagcagactatcaagcggcctgccatacagatgcctgatcagaaccacttcaagcaaccagccaattagagccgctacaatgaacgcaatcggcagagccacaacaaaataggcaccaaaccacgccgctggagcataggacatgaacagattttgtgttacatatgttgcatatgcaccgatcatgatcagttcaccgtgagccatattgatgacattcatcagcccaaacgttactgcaagccccaatgcaatcaacaacagaattgaactgatactcagaccattgaacatctgcaggataaacatatccatcgctatcccctcctccataccgtgactctcgatatttcacatgaattcaattatgggcagtaacactttccacatcacagtaacgctttaccgcgatacggtaagaggatgtgttgtcacaccctcgtttatgtttcagctgctttgaagcgagttgcctgttttattgcgaggtttctatgttatttagcgctgagggttgctccccattcatacgttttcagataagggtccggcttgacaggctcaccagaattccacaattccttgaactgcccatcctcctgcacctcaccgatccgtacggttttgtagatatgctgattctctccatccacggttaccttaccttccggggcatcaaactccagacccttggcagctgccttcaccttctccacgtcggttgatcctgctttttccaccgccgccttccagagataaaccgccacatatcccgcttcaatcggatcagctgtcactcgatcagcaccgtatttttctttatacttggcaacaaatgttgcattctcaggtgtatccgttgtctgataataattccacgaagccagatgccccttcaatacgtctgcgccaataccacggatttcttcctccgccacacttaccgagagggtcgtcatctgatccgaggagattccggcatccttcaattgtttgaaaaaggccacattgctatctccgttcagcgtattgtatacaatatccggcttcgcagccttgattttgctaatgatggtactgtaatcggtatgacccagcggtgtgtattcttcacccactacttcgccgccttctgctgcgagttgtgccttaatgacctgattggccgtttttgggaatacataatctgaaccgagcagataaaacgtcttgcccctgttctccagtaaccaggttacggatggaacgatctgttgattggttgttgctcctgtataaaaaatatttggcgatgattccaatccttcatattgtaccgggtaaaacaacagacctttgttctgttcaaacaccgggagcatagccttccgactcgcagaggtccatccgccaaatacagcagcgaccttatcctgttgcagtaacttcccagccttctccgcaaaagtaggccaatccgaagcgccatcctcaattacaggctcgatctgtttacccaaaactccgcccgcggcgttaatctcttcaatagcaagcatctccgcatctttaacagatacctcactgatcgccatcgttccgctgagagagtgaagaataccaactttaatcggttcaccggatgcagccgactctcctgtaccacctgaacccgaagcttcaggcggcgcagtgccctccacacatcctgtcatcacaatgaccgcacccagcaaaatactccataacttgaccgacctcttcttcaatagcctacactccctttttttagtctattgacgaacattaaggtcatttgcgtccgaaatgttcgttgatccaaattatggagggttactctcttcatgtcaatatagcttacataattttatttcatgcctacctgtttcatgcatactgctaataagccttgaagcttattgacaaagaaatcaccctgtgtgagtatatttaacatacaatatgatccatgaacatatcagacattataagcgaaaggtcggattgccttgcactggactgagcaggaaaaggaaaaactcctgattaccgtggccgctaacctctcccgtgaacgaagagcacgcggactcaagttgaatgttcccgaagccatcgccttgttgacctccgaactgatggaacgagcacgggatggaatgagtgttgccgaattaatgagatacggaggcaccatcctgacacgcgaagactgtatggatggtgttcccgatatgattcctgaagtacaggtagaagccacatttcctgacggtacaaaactggttaccgtacatgaacccatccgctgagaaaggcaggagaaaccatgattcctggtgaataccgtttgaagccagatgacgacatcatctgtcatccggatcgtttaaccctaagactccttgtccttaaccgcggcgaccgccccgtccaagtcggctctcacgttcacttctatgaagttaatgcagcactggactttgatcgcacgtcagcttttggacatcgcctgcacattccggcaggcaccgcagttcgcttcgaacccggtgaagagaaacctgttgaactcacgacctttggcggcaaacgccagattcacgggttcaacggattaaccgaaggctctgcggatcaagcccccgatccagtgaaactgaaggcattcctgaagacgttctcccctcccatacaagatggaggtgaaccctcatgaaacgaatgagccgtgaacaatacgcgtccatgtttggaccaacaaccggcgatgccgtaagacttgcggataccgaactatgggcagagattgaacatgattatgccgtatatggagatgagagcaagtttgggggcggcaaggttatccgcgatgggatgggccagtctactactgctctgcgaagcgacggcacccctgatactgtcatcaccaacgctatcattatcgatcattggggcattgtaaaagcggatatcggcattcgagatggtcacatctgcgccattggcaaatccggcaacccggatacaatggatggtgttcatcccgcactggtcatcggtgcttccaccgaaatcatcgctggtgaaggcatgattgtaaccgctggcggcattgatacccacattcacttcatctgcccacagcagattcaaactgcgttatcctccggggtcacgaccatgatcggcggcggaacaggacctgcaacaggaactaaagccaccacctgcacaccaggagcctggcacatccaccggatgttagaatcggcagaggcttttcccatgaacatcggttaccttggcaaaggcaacagttccagcaccgcacctttaatcgaacagattgaagcgggtgtaatcggcctgaagctgcatgaggattggggcaccacccctagtgctatcgatgcctgcctgactgccgccggggaacatgatgttcaagtcgctatccataccgatacattgaacgaaaccggatttctcgaaaacaccctggctgcaatcaatggccggacgatccacacgtaccatacggaaggcgctggtggcggacacgcaccggatattatccgggccgctggggagtcctacgttatcccctcatcaaccaacccaacacgaccgtacacacgcaacactgtagaagagcatctcgatatgttgatggtgtgtcatcacctggacccttccatcccggaagatgtcgcttttgcggattcacggattcgtcccgaaacaatcgcagccgaagacattttgcatgatcttggcgtgttcagcatcatcagttccgattcacaggccatgggccgagtgggcgaagtcattatccgcacctggcagacagccgacaaaatgaaaaaacagcgcggcaaacttgagctcaacccgaattctccctccgataacgatcggatcaagcgatatgtcgccaagtacactatcaatccagctatcgctcacggaatcggtcatctcgtcggttcggtggaagttggcaagctggcagatctaatcatatggaaaccggcttacttcggtgttaaacccgagattgtcattaagggtggcatgatcacatttgcccagatgggtgatcccaatgcgtccatcccgacacctcagccggtatttggcagaccgatgtttggagcctatggtagcgccattgccagcggatcgatcacctttgtctcccaagccgcagcagaagcagggatcaaagagtcattgggcctgaaaaagcgggttgaacccgttaaaggctgtcgctcagtcagcaaaaaagacatgattcataacgacgtcacccctgtcattgaagtcgatcctgaaacctacgaggtacgcgccgacggcgagctactcacctgtgaacccgcagacgagttgcctatggcacagcggtactttatgttttgataggaatacggattagctgataagggggcactcatgatgaacagtggcacgaagctactccgttatgttcagctgctggattcggccctgcccatcggtggtttctcccattccttcggtctggaagcttacacgcatgatggcaccgtgcaaaataccgcgcagcttgaacagtttattcgcagccagcttcactccagtcttgtacgactagatggtcttgccatcaaaggcgtctatcaggcgataaaacagcaagatgccgctctacttgccctgtatgacaaacgtgtccacgcccagcgctcccctcgggaactcagggaaagcggccacaagatgggaaagagactgctcaagctggcccgttcactctatccatggatggacttttccctgattgatgaggccatacgggaatacggtgcttattgtggcatcacgaccattcacggttatatcaactatcaattggagattgaattggatgaagccgttaccgggcatctgtatacctcggtgaacgcttatgtgaacagcgcacttcgcctgctgcccatcggacaaaccgaagcgcagatgttgattcagaaactgcttgatgatatcgaaacggaatgggctctcattcgagacaatgaccccgaagatatgcacagcttcggaatcgcccaggaaatctacgccatgcggcatgagaccttacccgcgcggctgtttatgtcttaacatcaacttttatataaccaaggaggaattgttatgtgtggaggagctaatcatacgcatcatccggagtgggaacgtaaggcatttgatcggagtcgtccgatgcgaattggaattggtggaccggtaggttcaggtaaaacagcccttgtggagaagctgtccaaggcactgcgtacacgttatagccttgctgtcatcaccaatgacatttataccaaggaagatgccgagattttgctgcgtcagaacgccctggcaccagagcgtattatcggcgtcgagacaggcggatgcccgcacaccgctattcgcgaggacgcctccatgaatttcgaagcggttgacgagttgattgaacgtttcccagatctgcaactgatcttcatcgagagtggcggcgacaatctctccgctgcattcagtccggaactcgctgatgtgttcatatacattatcgacgttgcccaaggagagaaactccctcgcaaaggcggtcccggtatcacgcgttcagatctgttgttaatcaacaaaaccgacctcgccccttacgttggcgcaagtctggaagttatgaaaaatgataccgaacgggtacgcgaaggccgcccttatgtcatgtctaatctaatgagcggtgaaggtgtatccgagattgtccactggcttgaacatcaatacatggatgacgatgcttccgctgcacatctgcattcacacagccatgaacatggcactcactcgcattaattcaccttctgtcccctcggggacagaggtgaatcggaatgaaagtgcaggtgagcccgtcacacgccgcagcgagcttcgggccacctttgcctttcaaggcgaccggacggtcatgactgatcgttattacagcgcacccctccggtttagccgatcctttcgacctcccggaggcggaaccgaattatgtgtgtacacgtcagacgtctcgcccggagtccttaacggggatcattatcattccgagtgggaattaggtgaaggcacccatgtcatgctgagcagcacatctgctaccagacttcatcctacaccttccattccctcatccgttaatcatcactttcggttgggaaaaggagccacgctggaatactttcctgaatgcgtcattcccttcaaaggaagttcttctgcgctcgctgtaacctttgagctggaagaaagggcaatcctggcctatgcagatatctggtctgccggacggattcatcggggagaagcgttccaattcgagcgttaccgcagcttgacggagatatggcaaggtgaacaactggctgtctgggatcgattcggaatcgaaccggataccgatgatcccaaacactcagcgtctctccttcactacacacataccgctgcgttatggatgattgccccaggtcttggtactgcggagttggagcaagtcagatctgcgctgccaccagatgggcgaatgctcgcaggtgcaagtttgctggcaaccggaggcatcggcgttcgactccttggcatggcagcttgggaactccaggagcagtgtcttcagatctggaacacactccgcccacatctgctgggcaaagaaactcttgtctttcgtaaataagggcatcaagcatagttaacaccaaaaaacctctgaactatctccgagtgtgttcggattagtccagaggtttttgtacattcagtctatggatgctgctcatatcacttacgcttcgttttcctcagaatcgttctctgatttgttctcaggtttatagcgatagtcgccagcatccttactttccttggatttacggtaacgggtgaactcaatatattcgctgataaaagactgttccacagtcgataattcactttcttggcaattcaattgccgcaaaacgtcaaaaaaataatcctcccgtttttcccgaaccatcgcttccttcgatggacgcccaatcatgagccagtcgaggctcacatcaaaaaacgaagcaatctcaattaacttattcgtactcggaatagacttgccacgtttccaatcacccagattgcctgtgctaatcttcagctgttggcagaaagccttcttggtcattcctcgttcggcaatcaggtgttcaattcgctcatagatcgactgcatacaagaaccgccttccaaccgtaataatcaactcatctgcttgaattataccacattattcctgaatgctcagcctttatatgcctggaataggatgagatatatcgtataacacaaagatagactcccatgaatgatcatagaagtctatcttatgttgttgctgtgatgcggtcgagaggactcgaacctccacgggtatacacccactaccccctcaagatagcgtgtctgccattccaccacgaccgcatattcaattgtaaaaatggtgagccatgaagggctcgaaccttcgacaccctgattaaaagtcaggtgctctaccaactgagctaatggctcttgctgtaaacttcaccggatgtgccatgcttcattcttgtctataagagcaatgactttgaggattactcatcgaaaatgtagatctcatgaggtggtgaagatatgacccgtaggggattcgaacccctgttacctccgtgaaagggaggtgtcttaaccccttgaccaacgggccttaataacaagttgtctttcttggcgacaagaatgagtataccacaggacaatttgaacttgcaatactttttttataatttatttttcaagcctttttgcccattgcatactcttcttcagagccccgttattagccacctcccgttcatgccaatgtcatccccgtgcaggaacaatgtaaaccatccatcaaaacacttataaaaacttacgttcacttataatattgcaaatcacattaaaaatacttataattaaagtatcagtataagtacggtcatccatacaaccggaggtgacatgtttgtttcaagaagaacgaatgcagctcattgttgaacatctacgcaaacacaatcgcatctcagccgatgatattgtcgccttgtttgatgtatcacgggatactgcacgcagggatctgattaagcttgaggaacaggatgccattatccgaacacgtggcggcgcgattctcccccctcctccgcaagaattcagatcctacaaagaccgtttactcgatgtatctgaggaaaagagggccatcggcaaactcgctgcggccattgtaagacaaggcgagatcattattctggactcttccacgactgtgcaggcctgtgccgagaacttaaacggtaaatcctgtaccgtcattactaattcgattcattccgctgatcttctctccaatcacactgctgtccagattcgtttgctcggaggcaaagtagataaggaacaacgttatgtctacggtacctctgttatcgagaccctctcccactattatgtagataaagcctttatcggaattggcggtatcaccatggatggcttcagtgcttccgaagaggaagggaaaattaaacaccaaatgatgaaagctgccaagaaagttgtcgttcttgcagatcaatccaagtttgatagacgttatggttatcgttttgccgactggtcattggtggatgtattgattacggatcaatggccaaccaaagaatggcttgtatttctagccgaacaacaggttgagattctcattcctgaaccaacagatgataaggagttgtaaatatatgaaattatttgccacagatttagatggaactttgttgaacatagatagccagattagcccggagaatgccgcagccatccaaaaggcccagcaatccggtatgaaagttaccatcgcaacaggacgtgtctattccgatgttgtgaccatcagccgcgaaggcggaatcaaaaccccaatcatcggctccaacggagcgacaattcatgacgcagacggtgaacgtttattccatcttccgctcgagcgtgacacagcagcttccgtcatgcagtggctggaagatcatgatgtctattatgaggcttcaacgcaacaaggcatctatgccccgcgtagcagtcatgagaccttgctcgccgagatggaacgtgttcttggttcaaaccctggtgaagacattgcacgcatgattggctccatcaagaaacactatgacaaaaaagactaccaccgcgtaaacagccatctcgaaattccggcagaagcctacatctataatattatggccttctccatgaatccggacaaagtaaagacaggacgagaatacttcgcttcccgatccgatgtcgctatggttgtatcctttgagcataacttcgaaatgcaacacccggacgtatccaaaggtaatgccctcaccaaactggcggctcacctgaacatctccatggaggatacagtagcgatcggtgataacttcaacgatgtctccatgttaaaaatggcaggactcggcatcgccatgggtaatggcgaacccgaaatccaggcattagccaaagccataacgctgaccaatgtcgagaacggcgtcgcccatgccatcgagtgcctgctcgagggtaaaccggtatcccgcccagaaacgattgtcggagaaggtcagtaattgaacctatactgaattaagcactgaacctgcatggtcacctgttgatccatgcaggttctctttattttaactcagcagatcgaacgtgaggcacatcctgtaacaaaataattagttgctcgccccggtatgaaccgggcagttgcaatgtgaactcaagcacggtctcttccacggagtctgtgcttgtttgctgttctgtcttaaatccgatgactgatatcttctcctgtcccagcagtgccaaaacagtcttcagggcttctccttccttttgcagatggatggttaacgtctctgttcgggcggataccagccagcgtgtgggtctatgcagtaacatctgtgccacgacaataagcagtgtcacgcctgcacccgtccaatacagacctgaacccacagcaagtcccatgcctgccgtagcccatatgccagccgctgtggtcaatcccctgaccgtgtgccgctgtgtgaagatcatccctgctccaatgaaccccacaccactaacaacttgtgcagcgatccttgaagggtcaagggacagattgtcccagccagcctgatcctggaatccgtatttcgatacaatcatcatcagggcagcaccaacggcgaccacaaaatgagtacggattcccgcttctttcattcgatttttgcgctcatatccgattagcacaccacatattccagctatgagtacacgcatcaaatattccacttccatgcacatcacctctttcattatgtatatgcttacatgagtctatctttactattacccaatctttacatgactatataagttgaactaaagattatttacactggcactacgatgacagaacaaccttccaatcgctgttatccccagattttttcgattcccttttctcaagggaaaatccggtgataaaggcgagcgcttcgctttttcaggttttttctgtcctctccgttatcgtgtaaatgattaattcatcttatataataaaaagcctccactcaggtcaattctctgcccggaaattttccccttgtctcttgcccaatccgaaataatgtctgaaattatatatcagcggatgccattcctccggattaattttgttcggtccagatattagtcttgtgtgcgcgtgcaccttcaacgctttcacttccacaatcgccatgaacggtgtatgttcgggaatacgtatgtgttgtacagccgcttcaatctggagcggacattcaactattttatctggagccacctgaaccgagcattcggatgtcagtccagctacagtgaatttatcatgacaatattcatagcccatctgccttttctcctcaggaaccgggttaactcccgtataacgacccaatgcctcaacctgtctccacatggtcgcatctggtaaattaatcacacactccgggtgtcgactcagattttcataggctttgccctgtgtccctagaccgagaaccagacaatcccccagtgcccaagacgaggataatggtgacaggttggttgatccatcctcatttaatgtgcttagcagcactacaggcgtaccataatataaaatactgggattcatcgtctcatgttgaatcacttctggactcgcggacaactgctctgtagcaaagtcctgtttcgttatctttttcatcctgtacctctcctgttcccattccaataatttataagctcaatctgacccatatgggacgatacaactcgattgtaatacagtaatagttcaggtatgatcgaagtatgaatgtatatccgaatattactgttattgcgtcgttaatcgctgatccaagccgcgctatttttctgtcatccttactggatggccgtgcgttgcccgcaggtgagcttgctcatatggcaagtgtcactccccagacggcaagcagccatctagctaaactcgtagagggaggattactcgaagttgaacaacaaggacgccaccgatactaccgtcttgcaaacaaagaaattgctaatctgattgaaagcatggccagtattgctccgcctgtacagatccgctctctcaaacaatccgatcagcttcaacaactgagtcatgcacggacctgttatggtcatctggccgggaaattgggaatctcgctctgtgaagccttagtacaaaaggggtatctttcagaccccgaagaggcacacagcaaggattatcaagttacagagaaaggaatacagtggttcactacgtttggaattgaacttcagatgaagccgggatcacgccgtgccatcgctcgcaaatgtctggattggagcgaacgccgtcatcatctctcaggtatgcttggggaacaactcagacatcggttagcggaactggactggattcgtcaaaaaacaggaagtcgctctgtcgaagtaacggaagcaggcaagaaaggtttatacgagatgttgagcatttcactttaggctgaagcgtacaccagggataagcaaagatcagtaaacgcaaaaaatccccttcacactgaccgttaaccggtctaatgtgaagaggattttttgtgcaatcagaacggagaaagaggtgtactctcacttcgttcgagactgcgaagtattgctaacgaagcttatgctccgacgaacctttagggttctcatccctttgcagagaagtttaattcagaacggagagagagggattcgaaccctcgcaccgcttacgcagtctaaccccttagcagagggtccccttatagccacttgggtatctctccaagaaatggctccccgaacagggctcgaacctgtgacaactcgattaacagtcgagtgctctaccaactgagctatcagggaaaattaacttgaataagattaatctaccatgattaataatccaagtcaacatcccttccatcactttctttaatacattgaacgatacgcacatcagatattctgaagccccagttttcccgcacaacgaccacaacggtaacgcttcggatctattttccgcttgcgcaaatattccgtaccacagctcttgcacaccagcttataacgatatggcaacggctttctgcctttgccgtcaggaagcgattggcagtaacgcgagccgcctaccttctgcaacaaagccttgaattccggatcacgatgctgatagccgcgcccacgaatatgcagatgatagtgacacagctcatgcttgatgattttctcaacctcatctcgcccgtaggcttcgagttgatgcggattgatctcaatccggtgacttttcagcatataacgcccccccgtcgtggtcaggcgactgttaaacaacgcttcatgggtgaacggcactccgaaatgatccagtgatacctgttcaatccattgttgcaattcctcattttccatcgatatcctctccttgcaccccctcggagcatttgtttttccggtataatacttgaattttaaccgtttcgtaggctacactgtcaagtagaatgtatgaggggagattattactcgttatgcctacaatgcgctatgtcatcctgcagcaggaacaacacttgcagttcgtggaaatgcccgcagattacgcctatcaactcagtgcgctcaacctgcgcctacacaaggaaattgataaactcactgcagcagatgtccctgtcctgccttgggcgatcgccgaatgtgacagcctcgatctcctaaacgaaaatcttactatcatcggcggccttgattatatcaatgcgcttgaagaatcttttgcagtattacgtgaaagccattatcccttgatttctctgcttaccgaaatccgagctcttcaggcccaattggaacaatggtatgaagaagagatggaagctctctaattcaccacagttatcattttataatgatgagaacgaaaagcacatttccctgaattgggatttgtgcttttttttgagtgaacaagattgatttgccggtggcctccacttatcccgcacagtccaggctattgccacatatgctaacgtacagatgaattatgcaagaggaggagatacccttgcctcaatggctttgcaatcaactgatgcgtgcatttcacaaaaaggacagccggcaaatcaagttgctgaacgaatgctggttcttttatcgtaacaaaccagcaaatggcacaccacgcagcgcggagaacgaactttaagaggttgttcatgaaagtctgcattggattacgaaggatggccctttgaacacgcactttaagaaaatgcacatattgcccaccgtacttactagaggaattagaacggataacgggactattactgtcgacaacaaacagccttcctggttagggaaggctgttctccaatcctactatttaagaagactgttgcgcagaagcaggcttcttcatcgtcaggccgacacggccttttttggtatccacactcataacccagaccgttacattatccccaacagacacaacgtccatcggatgtttaacatacccgttgctgagctgtgaaatatggacaagcccatcactcttgatcccaatatcaacaaaggcaccaaaatcaataacgttccgaaccgtaccttgcagctccatgccttccaccagatcctcaattttcaatacatctgtacggaagattggcaacggcatttcttcacgcgggtcacgccccggacgctgcaagctgtccagaatgtcacgcaatgtaggcacacctacgtccagtttcacagccaattgttctggctgttgctctgacagtaataccgacagttccttgctgcccagcttgtccagtgcaacctgaagctccttgaacagctgatcaactaccttgtaagactcagggtgaataggtgtacggtccagcgggttctctccctcaccaatacgcataaatcctacgcactgctcataggttttggcacccagacgtggcaccttctgaagctgacggcggttcgtaaaccggccattttcttcacggtacttcacaatgtttttggcaatcgtagcgttaactccggcaacatatgacagcaacgaaggtgatgctgtattcacatccacacccacatggttaactgcggattccacgacagccttcaggctttcttcgagaatcttctgagagacgtcatgctgatattgacccacgccaatggcttttggatcaatcttaaccaactccgccagcgggtcttgtacacgacgtgcaatggaagctgcactgcgctccgcaacatccagatccgggaactcttcctgggccagtttggatgcagaatatacactcgcgcctgcttcgttaacaatcagatacacaagactttcatcaccgttctcctgaatgatctcggcaacaaactgctccgtctcacgtgatccggtaccattaccaatgacgatcagtccgatatcatattgcttgatcatgcgatggaatacttcggcagcttcacgtttcttgttgtgtggtggcgttgggtaggtcacagccacttccagcagtttgcccgtatcatctactacagccagtttacaaccggtacgataggccggatcgacacccagcacacgtttgccatgaatcggcggttgaagcaacagattacgcagattggccgagaataccgatatggcctgattttcacctttttccgtaagttctccacgaacttcacgctcaatggaaggcgcaatcagccgcttgtatgcatcttcaatcacatcacgcaggatatcctgcacggcagaagcaccacgaatgatctgtccttccatatggcgatgggccggttctgcctgtacgtccaagccgactttcagaatactctcacgttcaccgcgattaatcgcgagaatacggtgtggaggcatctttttggctaattcgcggtaatcataataattctcgtacacggactcctcttgagcatccttcgcttccgaagtcagcatcccgtgatccaaggtgtaccgacgaatccaggcacgaatggcagcatcgtctgcgatgttctctgcgagaatatctttggctccctgaagcgccgactccgcatcttctacacccagttcagcattgatatatttcgcagcttcctggagtgcatctccttgtttcgattgaccccagatccatacagcaaggggttcaagacctttttccttggccacactggcacgcgttttccgcttctgacggtaaggtcgatacaagtcttccacttcctgcagcttcacagcttgcgtaatggattgcttcagttctccggtcagtttgccctgttcctctataatacggatgacttccaatttgcgatcctcaagattgcgcagataaacaatgcgttcttcaatcgatcgcagctggttctcatccagctctccagtcatttctttacggtagcgggcgataaatggaatcgtattgccttcgtccagaagctccgacgttgtgcggacctgcttcaaggacagtgacagttccttggctacctgtttgatgattcgttcatggcgttctgcctttattgtttcttcattgggttccagaaccgtttcctgttcagacaaaataaatccctctttccttcctgaatcgttcgttacaatcatttcagggcagctttgctgctgtaattacagtatagttgaaccatttgtttcttccactctaccctatattatcacagaatcacgtccagatttccatcaatccgcaagcatacaagttctgacagaatgatgtcatcctccagccttcccctttgcagcaaaaaaagaccgaaaaacgtcatcacgacgcttctcggtctttccgtttagaactttatatccatttgtaatctatacgcgttcaaagcggaacagttcgctcagatagtctcctgatgtgctgcctaccgaaataccgccatacatgagggcatcgccggtaaaggtctccgatccgcctttcagacggtaatccgcattagggtccaatcctttcagcttcaggcgctgaagtggcgcattgggctcagagagcacacggaagtagaatacaacagcttcgcttccgtccggtgcaataaacatccacgccgtctcattgccttcaaacggactgagcaaacggcggaatgttccatattgaaccgttccacgaatctccttgtacagctcaacctgggcttttacgatgtcgttctcttcctccgtgaattttgtcaggtctagctcgtacccgaagttgcccgacatcgcaacatgtccccgaatctcaagagaagtgatccggttgacctgatgattcggtaccgctgagatatgcgatcccatcgaacttaccgggtacacaagactcgtaccgtattgaatccgcaggcgggatatggcatccgtgttatcacttgtccacgtctgtggcatgtaatacagcatacctggatcgaagcggccaccaccacctgaacagctttcgaacagaatgttagggaacgccgaagtgattcgttccataacatcatacagtccgagcatgtaacgatgcgctgtctcacgctgtctatctgccggaagcaatgcagaacccacttccgtcatattgcggttcatgtcccatttcacataagtgattggtgcagaaccaagtacgtctgttaacatgcgcacaatctcatcacgtacatcctgacgagagaagtcgagtaccagttgttgacgtccttctgtgcggcgacgatcaggcacatgcagacaccagtccggatgcgctcggtacagctcactgtctggtgagatcatctcaggctcaaaccacaatccgaactgcatatccagacctgttacgcggttagccagatcatccaatccctgtggcaatttgttcttatctacaatccagtcgcccagcgaggagttgtcactgtcccgatgtccaaaccagccatcatccaagacaaacagctcaatacccagcttctgtcctgcgcgagcgatctgctcaatcttgtctgcattgaatccaaagtaggttgcttcccagttattgaccagaaccggacgttccgcattacggaacttaccacgcgcaagacgctcccgatacaattcgtggtaggactgtgacatgccgtccaaacctgcagccgagtacaccataaccgtctcaggtgtctggaacgtttcttgcggctccagcttccagctgaactcgaacggattgattccgagtgacacacgggtggtgtggaactgatccacttcagcctgtgcagtgaagctaccactatagacgagactgaatccataaacttcaccttggtcttcatccgtgcctggtgtcatcagtgcaataaaaggattctgctggtgactgcttgaaccgcgacggctctcaatcccttgcaggcctgacgcaagcggtctgcgaacaatatcacgttcccgtgtccatgcccctgacaactgcaacaattcataatctgcatgcggaaaatcaacagatgaactgagcgcacgcgccacattcactgaggtagcgctctcattaacgatacgcatggagcgtgtaatcgcattaaatgccgtaaaggctgtataggaaagctcgattttgatacccgcaacgcggtcttccaactcaataaccagcgtctctgcttcttcatcggattcaacatacgttgctggcaaaccagtaagcgctgtctttcctttgaccaatcgatggcctgtatacgtaaactccgaaaccgtcgagccattctcaagttccagttggatagccggattacggaaatcacttgtgccatacacgggtagttccactgccaatgtatcaaatgaaattgtacggtcctctggtaccgggttcggactgaaagatgctcgttctgtacgaacatgcaaccagctcagatcggtgtcgcgtaattttttgccataatacaaatgcaccaaatatcctgaaggcagtacctgaaatacgtaactggcctcgcgggtctgtaaatgaaactgaagtttctcctgattgatgtaaatgctcatatgtctcctccacctctatatataggtctttcgggtaaacggtttctcaggtttcattatagcgaaaagatcgccaatgttctacgctttcatcaagctttaatcaaaagagcgcataacagcccgaaggatgtcatacgctcttttggttacagtctgaattcagtgtgttcccttacgggaacatccattgccaacggacggcagtgcagcgtacaagacgctggttgctgccttaaaaatcgattaaaccaaggctgatctgtaaggcttcgttgaccaatttcatggtctcctcgtccagatgggtaatcttgtcagtcagcctctgtttatcaatcgtccgtatttgttcgagcaaaataaccgagtcccggtcaaagccgtgtgccgccgcatcaatttcaacatgcgttggcagctttgccttctggatttgggcggtgatagccgccacaatacaagttggactgaaccggttgccgatatcattctggatcaccagaaccggcctgactccaccttgctcggaaccgacaacgggagaaagatccgcaaaaaaaacgtcaccacgttttacgatcaatgtctacaccccgctaactaagcggtccagagtgctgtccgcatcttcctccgcatgaaaggcttcggatgccatggtcagattaatttttgccatctccatgtaccctcgctgcatcgtttcacggatgtaacgtttcttacgctccgttaaatacagcttcatagcctgcctaatcaattcgctgcggttggaattctccagcgctacgatgccatccacttcctgcaaaagataatcaggtaaactgatcatgatccgcttggtgttctgcaagttggccacctttcttccacccccacaaacctttcgccattgtgaaccagtattacgtttttccagaacttttatacaaaggaatatatatgccccgagtatatcaagtatgctgtactccattataaacacggggaacaatattcgtacagaccaaacatctcaattcaggaattaaatccttaccgtcatacataattcgagatgctccgacagttttccttctgttctgaaaaaaagtttattgggaatgacgtccagtttacctgtcaggatgtcaaaagtggattgattctggcgactactgctccaccgcgggtatatacccgtggaatgcggtgcgccatcatgcagatcacttcataagcaatcgtaccgagctgggatgccacctcgtctgcggttataacgccaccagactgatgaccgatgaggacaacctcttcgccgacttgaatttcttccgcctcttccgcgaaagattgtaacgacaccatacactgatccatgcagattgtaccgacgacagggacgcggcggccgcgtacaagcacttgtgctttacctgtcagcattctggaaaatccgtctgcatatccgatcggcagggtcgctattcgttcgtaaccttgcgtaaaataacgggttccgtaactgatcccccaatggggtggcagtgttttgaccagaaccgcttttgtcttcagcgtcaataccggggacagcttcaccacctgatgattcacctcagccgaaggatacagtccgtacaggcttattcccacacgtaccatgtcataggacaattccggtgtatcaatggcagcggcgctgttcgccgtatgtataatcgggatggaacatccctgatccctgagcgcatgaactacgctttggaaccgtctatactgctccagtgtataggttttgtcttcttcatctgctctggcaaaatgggtaaacatgccttccagcatcacctgattgagcgaagctacttcctgaatgaaagccaatgcctcatcgccaggcaacagacctaatcggcccatgccgctgtcgattttaatatgaaccttcagttggttagcgaatgtgctcgcatccagatgtcgaatggcgtcaagcacttccctgctgaacaatgtgacggtcacatcatgttgccatgcaacagcgattccttcaggcggcgtatatcccagtaccaggattggaatcgtaatcccatgttgtcgcagttctagagcttcgtcaagaaaagccacacttaagtaatccacacccactcgttccagttccctagccgtctccaccgctccgtgtccataggcattggccttcacacaggcgaggaacttcatgccctgtggcaatgcctcgcggaaagcttctacgttagtacacaaatgatccaaattgatctccgcttgggtcggccgatattgtccttgcacgttaagtcaccttctctaatcatcttaatccggctcacgtcagactccatcgtaatgctccagcatgtgactgtcaaatgaaccgaagtttcgcatccaaaaacagatgtaaggtgcgccttttgaagaacaaatgcgaatacagaagaagaccgataagcgagattagcagggcaaaattccacttttcacccaagcaaaatctgcttatatcgattatttacccggttccctctgcgtagaagcgcaatttgctttattgagtgtatcgggtaagaaaaacagcgctaaatgaacacctttcttacatcaaagcaaagcaccggagaacgggtctccgatgcttcttagcattccttatgtttatgctactattcgttcatttgttcaaaaatcatttgcctgactcttcctgcatggatgttgcaatgcgtaccatttcgttatcaggcagatcggcactggtgatccgatattctatgccatctgtcgtccatgtcagtgtctgcagtgcatctccgctgaccatgcccagtgtgaatcccagatccagtacacgggatggggcaagcgatacggctcgatcctgcggtctggcttcgaatatcgtgtaattatatgttccttcataacgaagcataaccgaatagtcccccgcctcttccagaatctgatcatccttgagctgcacaccttccggcgcataggtcggctgaattactccgaagctgtctgcaccttccggttctgcgagtgttggctcttcgccttcctgacctgttgcagcaccttctgtaccttgctgctctgtgtccccacctacacccgtctgtccatcagtgacagctccgtcaggttccggcgcagtctgaggattggcaggttctttaccgccctcattaccggtttgttccacaggagtcacaccggagtccgttcctgttttgccgccttcttctgtagcggctgtcatgttacgttgcatgtcaaaggcatctttctcaaactcagtcccgaatttgaaggagtcaaatttcacatcgactacaacattggcattggagtcggatacctccacctgtttaggtgcataatcgcttttgttcagccagatcttctgtctgacgagtgcatgtgtattataattggcagctacatcaaatacatagctctccttctcatccgcaaactgacgggttgtatcccccgtaatgctccgaatcaatgtttcatagagatatacctgtccttgattatctggccagttgctctgaaaacggaagcttttgttctgactcggcgtcaaaacaaacacgccttcatcgttacgcagtacaatctgtgttacatccttttttgcattcgttaacgcaatacgataataggaaggcttctgatgccatacctcgaccttgtactgctgcggcgtatctccggtatgcagcgtcatcacgcctgccccctggtaactttccatctctcctacgacttcgttcagatctttgaccacagctgccgcatccttcttcccgcaggcggcaagcaagaccgataagaccaataccatggcaagcatccatgatattcggcgcatgacatcatcccctttagcacatgttttcacttcaggattgtgcttgcagcagaacccctacttgattagtacatgttatgagggacttgttcgatatatgcggactagtttgacaagcaatctgtgaagtccgttaatacggcattgctaagcaaaatcagtctcagggaggatgttaactttatccagaaaaggcatagtgaattgtaggagattattcgttttattgaatattaggaggaaaaggtatgacgacaacaaagcttcgcacatcactggaaggactggatgaattcatcgacgagcagcttcaattatggaatggtgtcggcacagcggtggctgtgatccataaggatgaagtcatctggcaaaagggctacggttatcgtgacatggaatccaaacttaaagttacccctaatacgttgtttgccatcggttcaagtaccaaagcctttaccgcagcaaccgctgctctgcttgtggatcaggggatactcgactgggatacccctgtgaagtcgtatatgaaagacttcaagatgtttgatccgatcgcaacagaacgtataactatccgcgacatgctgtgtcatcgttccggtcttccaaggcatgagttggtatggtacaactccccgcgtacaagagaagaacttgttcgaacattacagtatctggagccaaatcaggatttccgaaacaaatggcagtatcagaacctgatgtacatgacggcaggttatctggttggacagctcaatgaaacttcgtgggagcagatggttcagaagactctatttaatccgctgggtatgaactcaagtctgttctctgttgaaaaaatgcaacttcagcctgactatgcttacccttatatggagaaggatggtcagaatacgagaataccttttcgagccattgatgccataggacctgctggttccattaacagcaatctaatcgatatgattgcatggcttcaattccagttgcatcaaggtcaatgggaaggaacgtcattgatatctaaggaacagatgaagattatgcatagtcctcagatgcccagtgattcgccgtttataagccaagaactgcctatgagtacatatggtctgggttggatgattgagccttatcgtggacatgccatgattcatcatggtggggctattgatggctttgcatcacaagttgcctttttgccagaggagcagattggaatcgtggttctgagtaataccaacggaagtataattccctatacggttgcttttcgtatcatggaccgactgcttggattagaacccgtcaattggagtttcaaattgagaaaattaatggggaaagaatcaacagaaacggaggctaatccggagaatcctctggaagtgcctattcaagcagacactgccgttgaggaaaatattgaagaacctcacatcataccttgtgatcgcccttacaccgcttatgcgggtatttacacgcatcctggttatggcgagatgtcgattcaagagacaacggacgggttgcaagcaacctttaacgccattgaaatgcccatggaatacaccgggaaagatacgttttccgtcgaatttgtgttattcggtctgaagatcacgtatacgtttaccctcaatgaatcttcagaagttgctcaatccatctccattcctttgttgcttgaaccgggtacaaagcctattgaattcatcagggtttcgtaaatgatctgaacctatataaattgaactaatgaatatatttacactggtcactccgatgacagaacaaccttctgatcgctgttatccccagatttttttgatttcttttcataaagtgaaaatccggggataaaggcgaacgctctgcttcctcaggttatttctgtcctctccattttgtataaatgtttagttcaatttatatagaaaacgcctgattcatttccgttgtggcagctaatcctaccacaacggaatatacaccggataactcgtatcctcttcagcggccccaaggcttctcttcacccacaatctgcgcagatcaggcagaccataccccgcaagacgataatctctcagcgagtcatgatgggtgtgttcttccttgaagctgtatgtgggcagaagcaatgcctcctgaatcagtcgatcttctagccgaatcaatctattcaaccgctccgcaggttcctggatcatgaccactcgtccacattcctgttccagttcatgtctccagtaatcattcatcgcaatcaggaataacgtattctggaaggtgtacatcgtcacgagactcagcacgacatgatcattgaagatttctcctgtatagatcagatcacaatccccaaacccatcttgatagactgcgtggaccggatctcccggcataatgttgatatgtaggccaatctgtttacatctctctgcaaaccagaccatatccgtctccatcttctctccttcttccacccacagacttaaactctgcccttgataagagctatgacgcaataatgctgaggcccgcgccagtgaggtctccacggaaaggtcaggtacaggtgtgaccgaaccatccggttgttccgattgctgtttccctggcttcccttgatctgaacccacctttaaaggttgctgtactcgtcctcgaatcagactataagcagcctgcgtgttcgtgcttccgagcgcttgcgacaactcctgcgcattcaatagctgttgaacagcccggcgaaaattcacctcatgctgcggcccttccttctgcatattaaacgtcatatacatgccaccctgcatctcatgctgcacggcacgaggctccgcatccggaaatatattatgcttgatgacggactccaccctcccagaatggggaagttgccatatttcaacgcggtcaatataggctcggcctcggaagtaggaagggaatacttccaacacaagcagcttggaatcatgacgcgtcaaccgataaggtcctgttccaatcggatggagcggattcatctccacatctctcggcaagatcgatgcagacatactgctcatcagatccgggaacatgaagttaggcttgtttaacacaaaacgtacagtcaattcgtccaacgtctctatgcgctcaatagatccaaacagaggcctgcacgggttactattgtcagagataatacgatcaaaggtaaacttcatgtcctctgaatccaatattctgccatgatgaaagggtatacctttgtgcagataaaaggtccattcgctcccctctgaatgactctcccatgccacagccagactcggttcacagacctggtgttcagcattataacgaaccaaacgatcaaaaacctccgcaacaataaaaacttctccccacatgtccgtctgcgtgggatccaatgtcttaaaagggatattccgtggaatccgcaatgtatccactcgtcctctgtcccctccattcgaacgcagaccaaattgatgctgcatttgctgcataagatgttctctcatcgtaattggtaaggtggcggccagttcataggcgtcctccatcctgttcccatccaggagatggtcaaatcgttcacgcgccacttcaagcaacgggacacaaaataccagcatcgattttttgcctcttccgcgctgcgggttccacctgacccatccattctccttgaatttgttcataatgaggttcatattgcgcatggtacaacataatagatcggcaagttcacctaccgttgtatgcatttcttgttcatcatgtacatgtagaaagtttaatcgcagttgaatgtaatgttctgatacgtccatagttgccctaccttctgctaaaatacgaaatccatccggatgcttctacagtttttcttcaggttttcctccattatactcagtaacatcaacatgaccagtgggaaggaagaaaaacgacttatgaaatacgccgatctgcacccgaacatcaggatacgtatcattactgattttttcaccgatctgacccaaaagtccatcattccattcatggcgatctatctgagtattcagattggcgcaggtttggcggggttattgctgacggtcaatattgtggcttccatgattgtgggattgtgggcaggatattggtctgaccgaattggacgaaaaaaattaatggtgatcgcacaaagtctccaagtcatggctctactcggcttggccatcgccaattcgccgtggatggattcaatcatcgtcacttgcctcatgtttctgctcagcagtctcagttcagggatcaccgtgccgattgctaatgccatgattgtcgacgtgagcagtgaacatgaacgtcattatgtatatgggttgcaatattggacaacaaatgttgctgtaacttttggtgcactgatgggcgggctatttttcgaatcatttcgtttcctattgttcagtctggtatgccttgaaagcctagctaccctgtttattttgatctttatgattcgtgaaacaatggataaacgtgtatttggttatggcgatactcccatccagaggaacatactgaaaacgtactgggcggtctttcaggacaaacgtttcatgatatttttcacggctactgtacttgcagtctccctggaatatcagttggataaatacatcgctgttcgtctaaaaaatgaattcaccgcccaactgttcggctcagatatctcaggtctgcatatgttcagcctgatcatggtcattaacaccgttatggtcgctttggttgccattccattctccagatggataggtcgcttccagtcccgatctatcatgactgttggtatgctcctctataccgcaggtttcaccgtacttgctttcagcaactgggcctggttactcatctcatccgctatattgctaaccattggagaattgatgtacgcccctgttcgtcaggtcatgctcgcgggcatgattccagattcggaccgtgctgcctatatggctgctgacgggttgagttacaacgctgctgcccttctcgggagtctcgggttaaccattggagcctttctgccctcctatgcgatggctggtctgtatatcctgatggggcttggagcgctcatctttttccgaatgttacttcggaaggcagaggaacagaatcaacatctgccgtgtgcagatgcatcttgatttcacttttctggcaacttttccgacaacaaaataatcatcctagggagcccaactggctctctttttcatgtccatgatcaacgtttataagtaaattatctttaacattttgtatattatagtttacatttagtaaaatatcatgtacattaggttcatggaggtgagcaagtggaagaattacacaatcacgttcgggagttacgagccagagaccggctatcccaagcagaactggccaaactcattggtgcatcccgtcaaaccattgccctgattgagcgtggagattactctccgtcggtcgttctggcactaaaaatagcacatgtatttcgtgaacctgtcgaaaaaatctttgaactgaaaggtggagattaaaatgaaaaattcatcatcctcgtccattaaaaagcggttgcgtcttcccttgtatgcagccggtggcgctgtagttggttttctcggcgctagcggagtcagtaaactcccttctgacttgaactggacgctgtccgtgtattatgactatgatcttttattcgcaatcctggcggctcttgtggtagttatgacggtgtggaacatcttcagtctctcccgcacgccatctgtccctcccatggaaaatgatgcttatggagattccgattcactcatctctcccgcagagcgctccctcggaaaagcgatgatcctcagcggattcagcgttattcttacgtttacctgggcagcacttgccttgtccttgtatgcatccaaccgaaccatgccgaattctccagaactgttcaacctcttgaattttgttgcttcatgtatctctattatcatcgttgtggtcgtgcaaactctgactgtgaagcgatacaaccgttattatcctgaacgcactctggatctgaactcgcgcaatatgaagaaagatcattttgagaagctggatgaaggcgagaaatggattgtctatcgcgcagcctatcgttcttttcagatgatgaatgtacttcttggtgttggaatggtctctatggttctatattcgatgctctttacctttgctccattcccaattgtgatgctctctgtgatctggattgccaacatcggaatctattatcgtgaaacctatcgtgcgagtaatcagtaatacatgggtaggtaactattttgtaaatattttcataaaggagtgtttgcatgcatttatccaaacgaaagacccgtttcaggttcacctccctaacaggagcttttatggcagtggttctgtctctcagtctgtgggtacccgcagttcaggcggagaccgcaactccagtagctgctgaacaaggaaagacgaaagcgctgacaaccgaatcagccacagcatttctggattcattcttcgattcacctgaggcaaaagcccattatgtaggagcctccgttgttgttgtgaaggatggcaaagttctggcggaaaaaggatatggcttctccgatgtggagagtaaaacagcgatcgatcccaaaaataccgctttccgtgtagcctctgtctccaaaacgttcacgtcagcagctgtaatgcagctggtagagcaaggcaaggttgatctgcaagctgactttcagacctatgtgaaagggctcgaatttgataatccttttgacaaacctgtaactgtggagaacctgctcacacacacgaccggattcgagatccgtgatccgcaacaggaagacatccatactgattttgataagtacatagcgatggaggattacgcacagcaacacatgcctcctgtcgttcgagagcctggcagcgcctatatgtacgataatttttcgtttttgctgcttggcatgattgttgagaatgtaagcggcgagccctttgaatcctacatgcaacaacatatcttcaaaccgctgggaatggataatagcagtttcatgctggacaaaaagttccaaaagcagctggccacgggctatgatgcggcacacaatccacttgatctttacaccatctctccaacaccaatgcctcaaggtggcatgttgtctaccgctgaggatatcgggaagttcatgattgcgttcctgaatgatggcgtgaaggacaacaagcgaattttcaaggaatccacggtaaaaagtatggaacagtaccgttcttccattcatccactgttaccaaacacgacgtatggattcgaagctgcatttcagcttcccggagcaggaagtagtccaaaagttattacaaaaggaggcgacctgaccggattcagctcttatctcttccttattcccgagcaaaatacaggcgttttcctgacgtataatcaaaatggagcacttcgtaatctgttctaccctgcattcattcagagcttcttcccacaatatgcagagcctgtacagttcaaggaatacacgccgcaatccgcagctgagctgcaacgctttaccggattgtatgctgatcttcgacttagcacgattgtgagttccttgaaaggtggcggggataagccaggacaactgagcattaacgatgtattcctgggtcaacgcaacctgattcaagtggaggataatctcttcaaagatgaattgactggtcaattcacagcattcaaagaatatgcagatggcaccacatacatgaaagaaccttacctcaaccctatgggttatgagaaaaaaggtcaaaagcctatgggcttccgggatgttcgtgagaacagtccttatgctgaagccatctatgccatacaatctcttggatattatgagaatgatggcaacaagtctttccaaccaaaaacaggtgtaacacgagctgaatttattgagaacacccttaaactgagtggattgaagcccagcaaaactacgcctcctgctggcaccgactgggcagatcatgcagcagccggatatattcaactcggatatgagttgggtatgattactggcacggacgaacagcaatttaagccggatcaagtgattatccgacaggaagccatggtcatgatgtggagaattatgcaactgcaatatcctagcgaactgttcaatgatgtgaaacttgcggggcacacagatgcatgggctgtaccagccattcagatgatggcgaagcttggtatccatggacccgaggtgaaggtaatggaggatggttctgttgatttcctttcccgcaaacctctgattcgtcaggaagaggctgcgatcatgtatgcgctgcttacccaaccaacagatcaaatcgtcgctgaactgatggctgctcagcagccacaagcagaacctgctgaaggagctgagcctgcagatgagacatctgaaactgcgccggttcctgtaccagcgccggtcccttctgtgacttcagcacaataaaaataaaacatcttcataccgattagattgatcatgcttatgatgcaagaaaaaaacaggcttgttcagaaggatacgatccttcttgaacaagcctgtttcgttacttttcataacttattatagcgatctgttactgggttatatccgtctctattcgatcaacgaagatacatagtggttcccgttgcgctgatcaaacttggctgcagcggtctgagcatgctccgcaaagtaatcggccaacttgagcaggtcgcctggattaccttcatacgggaaggatgctggcagacgcaatcggtattctggagattcttgcacccagcggcgaagcaatgatgccgctctggcataaaacaacattttagcgtaaggatcttcatgatcagcagcgaacaccagtgtttcctccagcacatcaatgcctttcgccggatttgtacgtgtgagataatccatctgctccgcaaaactctgcacaaaatcgttctggcctttgatcaggcgatatcccttggtctgatgtttatctgcttccgcagtccgtcccaaccgatatagcggcatcaaaatttcagacaaagtcagatgcggaatctctgcacagctcatacgccctttcaggataggctgtgccgcctccaacaccttctcatcgtttccttttaacaagaaatatcgcataatctcatcctgctcacaggcttcgcagtcactcataaagtcacgatccatcgttctgaatcgatcataactacgtcccgcttcctccagctccccaaaatccataaagatccggaaccgataataccagtaggagcgttcgctgtaaccgtaggacttgaagcgccgtccgaaatcctccaacagctccaggatcttctcacgtgatatttccgggaagtcgggcatcttacccaatatccatttgtacgaccacattaacgtttcttcatcatattcttcgggctgttggtcgaacttgcccagctgccaggaaaaagcaatcagcgctttcatcggataaccacagaatgttgctgtctccacaatctccgatcttgcttcatatgcctcttcctccatgccgttcacatcggcgactcttgctgcttcctccagcataccaagtttcgccggaccattgggcaaaccataggcctcgtccatcagttcttcaaaatccatctctgtcttcatcaggcttcccccttacgatctgtatttgcacgcaaaccccaatcaataaaacgaacaatgccctgatttaacacttcaagctcctgcttgctcatggcataatgccccatcatcagtgcattgacgtataacatctcgatggcaatcggcgtcatctgatcatccggtgatgtcagtacccgctgaatgatcggattactcacgttcaaatataaggttgagtaccctgctgaactcatactagaagacaatgaacccagaacagacgagaacaattccgtgctctcctcgcttgctttttcaagcgcacgcagggttgaggattcctgagacagtgtgaacaacactggcagatccgatggcttaaaacctttcacctcagcccgacagcggaagcgctgtaaggcagaatcggccagtcgcaatgcatcataatactgattacgctcagcgggtggcacatcggtgaaactcatcgagacctgatccggctgtagccgctccgtgtgtacgttgtgcacggtcattggcagtgtcgccatcaactcgctgtcatagatgtaaccaccattaatcaccagcatcgattgtgcggatgccacatgatgaatctgacggtactcatcaacagaggacgtgaaatacaatgtctctccttcatcgatcagctcaccaagttcacggtgacccctcgtgctctcaaatggcagccagcggtgaatcatcgcgtagaatgcttgatcttgcacagccagtgccttcatggacagagcatgcaggcgaatcagcttctgtagccgttctgtctggctctcagccatgtcggccagtcccttgcgaagtgcgtctccgagttcggagcgaacttcctccagcttttcattttcataaaaatgttcccgtgatgccgtcggttgaagctcatctgtccagatcagacatttcacgaagaaagcccactctggcaaaatgttctcggccttctccgaaatcagcattcgcttcaagtaaacccggtgagaacgcttggcgttcagattaaccgcgtgtggcagtacaaaagcaatacccccggtacggcctgaagccgttgtcaacggaatgaagtcttggaactgctcgccaagcagacgttcaccaaatgccaatacctccgctctgcgtgaacgtgcgagtgcagggtccatcagccagatcggtgtctcgctattcaccacatgttgcgcgccgtcatgatacagcgtgaccggatacggcaataatgctccgtaatagaacagagcttctttcacatactctggttcaaagtagtgcgccgcgtccggtgtgcaacgcagatatactttggtccccggggacagctgtgtgtccaactgtcgaatcgtataggtgccatccggcttgccccgccactccatcgaagggccgcccttcgcggattgcgtcagcatgacaatttcgtgactcaccatgaaacaggataacaacccgatcccgaaacgcccgataaaggacgtctctccatccagcagcgcttgctgccccctcttcgaggattgtccaatcatcgccaggaattcatggatgtcagcttcagtcaagccgatgccgttatcctccaccatcatggtcaattgctcacctgttcccgtcagttcaacacgaacttcaccctgataccctggctccgcctccgttcgtgcggtaatcgcatccgtcgcattctgcatcagttcgcgcaagaacactttaggactgctatatagatggttggataaaatctggatcatcccgctcaggttcacttgaaaacgatattcattggatgctgtcatgactcactcaccttcctctacgtccaatacacaatatgtacccatacgatgtattcatatggatgtgttagacgaattcattatgtaatcgttagaaacagacgttccccgtgacaggcacgccaaaacatcacgtcaagccggccctgaataaccaagaccggcgttatatgcatatttcaggcattcatgagacgtaaggccttatctttcattaccacgttatgaatagcaatgaaacggatgttctaccctaaaataaggatacatgttacaaggcagagtgaaaacaaacctgagacccgatttcaggcagacttcagggtaaatgtgcatcctccattcgggactattgaaggaggaaaatatcttttttgtcgtccatttgaacgatatcagcctaccacacgtataatctccaaactcagatcggacggtgaatatacatgatcgaagtacgcaacatatccaagcaattcaaagtgcatcaagcactgcatgatgtcagttttacagttaaacaaggcagtgtcaccgggttgattggacccaacggttcgggcaaaaccacactgatccgtatcatgaatggggttttgggcgcttccagtggacaggtaaccattaacggattggacgccgcttgtgaggcagagaaagtactggccatgtgtggcactcttaccgagcaaagtggattatatgaaaatatgagcgggcgtgacaatctgactttcttcgcagatgtttttggcctgaagcatgccaagaaacgaatcgacgagcttgtaaatctgttcgagttgcaggattatcagcatcgaaaagtcggcacctatagcacaggcatgaagaaacgcttgggccttgcacgagtactcttgcaccgtccttccatcctgtttctggatgagcccaccaatggcctggatccggatggaattcagatggtgctgcgcattatccgtcagttaaataaggaagaaaagatgacaatcctggtctcatcccatgtgctgtcccaactgtcagctgtctgtgatcattatattttcatggaaaaggggcgcatcgtggaggaaggcacggaacaggagattgttagccggtacctgtccactccgaagctcgaagtagaagccgacatgccagaaggatggcacacggcaaccgactttacacctgaaataatctccgcacatcaagcagtatttcagcttacatcgcgtgaagatattccattactgctaaggcaattaacggagcatggtcaagtctatcaggcccgcatcacgggcagtgatctggaaagtatctattttgccataagggaggcacatcaccatgaataaccaccaagccatacgtgcactggtacgtaaagatatccggtccgtcacagccagcgttcagctctggttgcccatgttgattgttccactgattatcggaatcattatgccctctgccctcctgtgggcggcctccagaatggagcttcgttctctgggcaacatcagctttctactcgaatcattggatgcgttaacccatggtggacagattcctcagcttgcttccatgcctacagataatcatcgtattgtctattacttggccatgtatatgttcgctcccttgtttctcatcattccggtgatggcctccagtattctgacggccaatagcttcgctggtgagaaggaacgtaagacgctggaagggttgttattcacaccgatcagcatggagactctttttaaaggtaaagtgctagctgccctgatcccttccattctattatcctgggttactttcctgatctacggaatcattgccaatattctgatgtaccccatgtttggaacgttgatgtttcccaatctgaactggatcatacttgtcgtgtgggttgttcccgcttgcagtcttatggtcattttattaaacgtcctgatctcggccaaggtccgtgggttccaggaagcctatcaactcggcggattaattgtccttcccctcatcgccttagtcgctggtcaagccagtggcatgctgctgattggtccttggatgttagtcatgattggagcagtgctcctgctcataagtgtggttcttcttcgtctggtcacgtcgtggaatagtcgtcagcaactggcggaaagtcagatctgaatgatgtagagtgtagcgacgaaattcaacaatctacactgtcgctccgctatgcagattgagaaataaataagtgcaggttatgatgtggagatatatgctatgggatgatttatagagaggaatggaacaacggtatggaatccaaactacttcaaaaattaaaatatgcttcacaattaacggcacaggagaagcatattgtggactatatcctaagcaatcccgaagttgtatttgattccacagcccatgaactggctcagcagacctatacaagctcatccaccattgttcgcttatgcaaaaagctgggtaccaaggggtacccagactttcagctcaagcttgctcttgaatatcaacagataccttccgcgttgcagacgcaggatcatgcaattgcagaacaaggcaacgtgctggctgccatcgactcggttccttacctgtaccagcaggcgctagatgatacgcgccggatgttaaacgctcctgttttgctacgaatcgcgaactgggtcaaagaatccggacgtatcgatatctatggcagtgatatgaattattatctggctcagcaggcttgtgccaagtggaatgaactcggcatatctgcgattgctcataatagtcccaacatgcattacttgaacacgatgaatcccaacagcctgacgttgtcttttgttatctcgcacacaggtgagaatcaatccatgattgaagctgccaaagtgctgagcaacaaacagatgaaagtcatcgcggtcacgggcaacaaccattcaaccctgtccagacactgtgatgaaacgctgctggcttacggatacaatgaacaattaaggctatccaaaatgtcttcgatggtctcggtactctacattttcgacatgttgtacatggggagcattagcgatacgtattaacgattaacacttatccgctgcaaatacgattccggcatccttacgcgcactcatgagtacactcatcacagactggctgtgttcgagcagttcgtaacaccgtttgtgatccccatttgcatggatgtccctgaacgcttcccactcatagtacagccaattggatttggtctgcgcattatacgcctcagcaggctcattcccgatctgaagcttgatctcacggcaaccgtttgctcctcccacaacctgaagataacctttctcgccctgaataagcacaaagttcatgctgtttgtgtctttggcacctacacattccgcaataaactccggatacttaagaaccactacacctgacgtatcaatgccgtttgcatgcttgttcgcggtatacgatacggtattcggactgccaaacagattcatgaccagatgcagattataaatattgatatccatcagcgcgccaccagagaaatgtggattgaatacgttcggcgtttcccctgcaagcagatcattgtatttgcgcgagtattgactgtagttacactggatgagtttgatcggaccaagctttggtagttgctcctgtatgactttaatattgggcagatgaatgttggaaatggcttcaaacagcaacagattcttttcttttgcaagtgcaatcagcgtttctgcttcctgaagcgtggatgtgaacggtttttcacagacgacatgtttgccatgttgaagtgcctgataggcctgttcgtaatgcatgctgtttggtgaagcaatatatacgagatctacatttgtatctgaaaatagggattccaggtccgtatagatggtatcgaccccatacttacccgcaagctcctgtgctgtctctctcttccgagagtacatcgctgtacacgtaacatcttccagctcatttatcgcagataaaatggcatccacaatggaccctgtaccaatcgttgctatattcatcataccgtttcgctcctgtcgttggttgtttgtcagttggctctcttcgccgcttcgattgagtgtaatgttatcacgatcaagtcaggcggagaatgctttgagacggaattggcagcatcatgcgcaattcgatttcaggtttgaatgactatgaaattcaatttcattctcttcttttttcatgtttgagatctaacatgtcttccatagtttaccgatataacataaggaattaacgacatacatatagaagaacgaaggggacgatgaacgaatgaaaacaaggtatacatacgtacaacgcaccatctgtacattgctgttatttacactcattgcagcagtgacattgggaggtggaaccgcagccgaggcagcttcacttagccaatctacagtgtattatgagtccgacggagttttgtacaaagtatccgcggatggcagcaatacaacagaagtattaattgatttccaaggggtggacttgctcgcggcaggctcttacctctactacacgcagactgcttcttccacaaccttgcttcgggttccgaatgacgggtccagcgatgcggcagagacatttgctacagatgtactcagctattacacggataacggattcatctattatctggatgctacaggtaccatttatcgcgcgaatggcaatagtgacgcttcatctgtcaccaagattgctgacaaggctgataccgacttcccattcctcctggtaaccaaagggcgcgcctactataatgcgttagttaatggaaacacgtggatcgtgtccaaaacgtccaacggtgctggagctgtgcagcggattgccgcaggcgcagtggaaggacgttattttacgaatcaagccaaaaacgaactgcaactgatggtaaatacagacccctacgaggagttttattccaccaatgctgttgtcctgtataaggtgaactacaacactggcaaagcaaccgcggttaatcccaaagccaaactggatgtgaatgctgtatattccggtggttggggaaacaacctttacgtgtataacaaaggaatcgttctcgacagcaataaggattacaattatgccaaaggcaaagcgtttgcgttaaccacttcagccaaaacacttcagcttcataacaaaagcgttcgtgaactaagtgccttaggaacagacaaggttgtcattattgatgcagacaaaaaggcttatgccaaaacggtctcgggcaacaaagtgaccaagtctgccaacctgaacctgaacaatgtaacgtatgttgcgaatcaattgaccaatggtacatctacggctgcatacatctcgggcaacaatggactctattcggttaatacagctctcaaggtaacgaaacttaccggggacgaatgggatgcattccatatcagagatgatgttgcgggcctcttctacatcaatgccaaagatcagtatcgcttgtatcacgtgcaaaccggtggaacagggaaaaaagtaatgagtgacgttttcctcgacaatattctattggtgacaccgtactaacatatcctgttgattcaggcgtatagcccattcaacggacttgtccataacaaaaggattacctggtagccataacggctcttggtagtccttttttggttgccgaaaactatttttcaaaaacatcttccatatgagaatgataattgttatcattaagaaaataagacaaaaggatggtccgtatgactgaacagtttcccttcattgctgaaacctcatctctaccgctcctctcctccatgtgccgtgtgcgtcgtggggagaatttccgtgtgcaaggcaagacggtgtcacggcccatgctctgtcttattttgcaaggagacggtgttctggtcctgaatgatacagtctacacggctcaagcgggcagcttgtttgtactgaagccaggaacaaccatcgaggccgctgcacgctcgaatatgaccgaatgtatattactaagcatggatacggtttgtttgcagcaagtgcgcggtgaatggaaaatgacctcatcacctgccttcccgctggattgggagacaggcaggttgctggttcgtcacgagcagcaggctaaattacatttcgaacaactctatgaaacctatcgcggtcttcaaccggatcactttatcagcatacatagccagctgcatgagctgttgcaatttctctcagagaacaggctggaagccaatcatgagaaagtggaccctgccttggaacgcagcattatgtatatgcgacgttacatgagtgaaggaatcagcatggatcagcttgccaagattgctggactcacccccagctcttattcacgcagtttcaagaaggccaaaggcatgtcaccgaccgattacctgaatcgtttacgtataaacgaagcaaaaaaacagctgacagaggaatcctgtatcctcaaagacgtcgcggtatctgtcgggtatggtaatgagtattattttagccgaaaattcaaacaaaccttggggattgctcccagcgtatatatgaaaagagatcaacttcgcgtagctacagcatccattatgggattccatgagaacttggcctcgcttggactgcgcccggtagctgtgctggaaggtgaaggtgtgtttgaccgagaatcggatgaatatgaacaagaacgccgattaaccagacaattcgatcaacttcggcaggcgaagccagacttgatcatcggtgacttttaccacaagccctattacgatcgcctgaaaagtattgcacctaccatcatcttggagtccactgatgactggaaagagaaccatattcgcatagccgaactggtcggacgtgagaaacaagcgttgctgaatttcaaagaacttgagtttggcaagcttgaagcaagcttgaacctgcaaccctatttcggacaaaaacggttggctctgatggaggttacgaatcagttcattcgcttacaaggaactggcgagcatccgttaaatcacttgttgtatgctgaattgggacttcagcctgctcagcttgtatctcccgaaagttccagaaatgagtatgcagcggatagtattcccgtgctggacacggattacctgttaatccatcgtgcttcgcttcagcctgccagtgaaaaggtgttccgacgcatgaaacaaacggcatcatggaatcgatcccctgctgtattatatggtcacgttcacgatatttcgaactggcaacggttatgctggaccccggctggccggttgcagattctgaacgaactggaacagataactcagcagtctgtagtctttcctcagacaggtctgatcggacattagatgtgaacataggtcgatacgatgggcaagattatcttttacatcgtgttccttcattaataattcagtaacatattgcacaggccaaagggccctctcctataacggaaagggccctttgcatgtaattatgaatgttccttaatctcttccttcggaacaagcttgtatatctcttcattttccatggtatcaatcaaccgatccaaccatttgtaatatgcttccgcttgcaaaactttgtgtttgtcttccatcagaatgtggataagttcagcgtctgcctgctcatccagaccttcgactaaccgattcagttcttcaattgatttgcgtagaatctgaaggttactctccacggcttttctccatttaatcgcaaaataatccgtaaacgtctgatgccagtcgtattccacttcatataggtcttttctggagcccttgctccacactttatttaccattttcaaatccagcagtgttcgtacacctgtactcatactcgttttgctcatttccatttcccgtcccatatcgtcaagggtcattggtttgtctgcaaaaaatagcaatccatataagtgtcccgtcgacagcgtaacgccgtaaagatccatattacgtccaatggcttcaatgacgcgcttacgaatcttcagcacggttgcctgctgttcctcttgtaaatggtccaagcccatgcttgcaacctccattctgaacattccacagtctttggcgaaataattgcaacactttaaaagtcctgcttacatgggaaagcactcggccggacatcatatatgccagagggctttcattcacccaatgtatgaaaatgggaactttaccaggctacaattgcctatgactatcttttaaccaaaaaattcagcttcaattcagctcattttctattgtaggaaaagcaatgtcaaatgtaaagctgccttattagccagaataaggagaatgacggagtatttggacgaaaaactttgtacagtttttactgtacaaacattatgtactgtttattcggttgatatactggttaagtattgttagacttaaaaacgttacccagaaagacgggaagcgaagcaacaattaccggatttcgtggctgggcgcataagtgtatgggcttatggatgctgaaagccgttcgaagtgcacaacacatcagaaggggtgaaaacatgaccatacttgaagtgaaaaacgtaagtaaattgtttggaccccaaaccgagcaaggtctgcaattactggagcaaggttggggtaaagaaaagttggccaaagaaaaacagataacggttggtgtcaaccgggtcaacatggacattaaggaaggcgagattttcgttattatgggactgtccgggagtggtaaatccacactggttcggatgttcaatcgtctgattgaaccaacatccggagaaattctggtccatggtaaggatctacgcaagatgaacaaagaacaattgcgcgaagtgcgccggaaaacgattagcatggtcttccagaagtttgcgttgttcccgcaccgtaccgttcttgataatgtggagtatggattggaaatacaaaaagtagataaggaagtacgccgtgagaaggcaaaaacctcacttgagctggttggccttaagggctgggaagacaaaatgccagatgaactcagtggcgggatgcagcaacgtgtcggcttggcgcgtgcacttgccaatgacccggaagtactactgatggatgaagccttcagtgcacttgatccattgattcgccgtgatatgcaagacgagttgatcgagcttcaggataaaatgaaaaagaccatcattttcattacccatgacttggacgaagcgctgcgcatcggcgatcgtattgccctcatgaaagacggcgcagttgtgcagatcggtacaccggaagaaatcatgattcaaccggccaactcatatgtggcccgcttcgtcgaagacgtggatctgtccaaggtcctcactgccgctcacgtcatgcgtcgccctgagacaatcacacttgaccgcggtcctcgggtagccctcgaactcatgcgcgaaaatggtgtctctaatctgtttgtcattgaccgttcgaagaagctacttggtgtcattactgcagaagatgcaacccgtgcaatgcgcgaaaataaagtattaaatgacattctgatcacggacgggccgacagtgtcgcctgagaccctgattcatgaattgtttgagattgtaagttctgcccatgtgccgctcgctgttgttggtgagaatggccgtctgcaaggtgttatcgtccgcggtgccctgctgggtgcacttagcggtgaagttgcagtaaaggaggaacttgagaatgattcccaaaataccactagcatcgtggattgaatccatcgttgactggatgagctcctcgctctccggattgtttaatgtaatctctattgttattcaggcagtagttggattcttctccgggctgttcatgttgccccatccactcctgttcattgccatattgggtgttcttgcgttcctcgtaggacgactcccactgacactatttacggttatcgggttcttgctcgtagataacttgggatactggtcccaatcgatggacacactcggtctggttatcacttcaggattggtttcgatcctgcttggtgtacctgtcggaatctggctcgcatacagtaaaactgcggcgcgtatcattacaccgctgcttgacttcatgcagacgatgcctgcatttgtctacttgctgcctgcggttacattctttagtctaggtgtcgttccaggtgttatcgcgtccgttatatttgcgattccgccaacgattcgtctgactcacttggggatcagacaggtatctagtgaattggttgaagcagctgatgcattcggctcaacttccatgcaaaagttgttcaaagtacagcttccactcgctttgcctaccgtgatgtccggtattaaccagaccatcatgctgtcactgtccatggttgttattgcatccatgattggtgcacaaggtattggtgcggaagtctatcgtgctgtaacacagcttcaaatcggtaaaggtttcgaagccggtctggccgttgttgtactcgcgattgtactggaccgttttacacaaaatgtatttatgccaggtcgcaaaaagacctcacgcattacagccaagcaaaaagcatggatcactgctgcggcaacattccttgtgcttgtagctggtttctcacaatacttcgttggtggcacaacttcggctggcggcaacaactcagctgccaatgctgtaggtcaagaagtgaactatcagattattggtatcgatccaggggctggtatcatgaagtctgctgcaaaagcgatcgaagactataaattgactgactggactctgattgaaggctctggtgcagccatgacggccacactggacaaagccatcaaaaatgaagatccaatcattattacaggttggactccgcactggatgttcaacaaatatgatctgaaatatctggaagatccagaaaaatctttcggtgatgctgaagaaattcacaccatcgcccgtaaaggtctgaaagaagatcaccctgttgcgtttgaattcctgtcccgtttccaatggacatcggatgaaatgggtgaaatgatgactgctatccaggatggcacatccgcagaagaagcagctaaagcttatgctgagaaacatgccgatcagattgcagagtggaccaaaggtctgactccagtgaacggtgatgcattcaaactgagctatgtggcttgggattccgaaatcgcaagtacgaacttgttgaaatatgtgatggaaaacaaattgggttataaagttaacgctctgcaagtcgaagccggaccaatgtggacgggtgttgcctcaggcgacgtagatgcctctccagcagcttggctgccattgacacacgcagactactgggaacgttacaaagaccaggtggatgatctgggggctaatatgacaggtgtacgtacaggcctcgtggttcctaagtacatgactgaagtaaacacgattgcagatctggagaccggtgcagcttcttccactccatcggcaagtgctaatgtgggaaatgaagtgaatcaccaaattatcggtatcgatcccggtgccggaattatgaaatccacagcaagtgccattgagaaatacggtttgtctgactggaaactggttgaaggttcaggagccgcaatgacagctacgctggataaagctgttaagaataaggaaccggttatcgttactggctggacaccgcattggatgttcaacgcatacgacctgaaatacctggaggacccggaaggtgtctatggtgaagccgaacagattcatactattgcccgcaaagggttaaaggaagacaaacctgtcgcttatgaattccttgatcgcttctcctggactacagaagatatgggtgaaatcatgatagccattcaaaatggagaagatgctcaacaagctgctgccgcttatgccgaaaagcatagtgaccaaatagctgagtggaccaaaggtctgaccccggtgaatggtgaacccatcaaactaagttatgtagcttgggactccgagattgcaagtaccaacttgctggagtatgttctgaaggaaaaactcggttacaatgtaacttcccttcaagttgaaatcggtcctatgtggaccgggatcgccaacggtgatgtagatgctacaccagccgcatggttgccacttacttctgcagattattacaacaagtacaaggatcagatcgatgatctgggtccgaatatggacggtgccaaaacaggtctggttgtaccagcctacatggacatcaactccattgcagatttaaaagataattaaaccagattgagttgtataaacctgaatttggtaaaaagaccaccgaaatttttcggtggtctttttgagtgtaactttacttaggaacgggaatgccttctagcctaatgaaagcctgaatgtacctgaagtgccgttaaagtggattttttccctttcaatgaaaagcttcgctctggatgggatcaggagtcagctactcacacacacggttggagcagagcaaatacaagcgctaacgaatcagagacgtcttattcaaggatatgaagcgattccagaaatctaaagaacctgagacacgctatatcagaataaaacagtcgtttgcagtgtttttgtcagagattccagtaaataacgtgtctgatgttccttactttgtaaaaagaagagctgaaggcgaaataaggcgtcctgagttccttagaaaatggtctccctttccccagggtataaaggcttgggctcaagacattttaaaatgctaatctccacaccctaactaacttcgaaaatctcaagcataatgctaaacgtactaatcgttaccttctacattaaaggttgtgaaattgaattatgtactcaagctctgcaaattcttctcttttcttttcttttctattcctacactttaccaatcagcaacaatagtacaccaatggcaatcatgacaacaccgagaataccatacaccactcttgcaccctgccgtccaatggttttcacaaaaatacctgctctaaaactcttcataaaccagtcccaattgttgataccaccgagcaaactaaaaattcctgccgctatggcaaatagtgcgattaaaacaggttgttcttgcatgtcgtcaacactccttcaatataatcctgtctactataccttcgcttggtgaaaattaacaggcattaattgggcgtatctcaaaactcgctgaagtgcatctttcaccgccttttcgccccctgctgcgtcactttcccttgacgtgccccagcacgcctgcagaaaacttccttgcttggaacaaatattcggcaaaatctacttccttcggagttttcagacacgccctagtaaaaaaacagcttgcagatggaagtctgcaagctgttctaaaccgtctgtatcatgcgttttattgcttttgcaactcgcttgctgacaataacaaggttaccacttcagcacgtgttgcttcagcgagggggttaaacttatttcttcctgttcccttcaccagtcctgcatcatatgcagcagcgatatatggaacggcccatgcaggtactttatctgcatccgcgaaactcagtgccggatcggactccactggaaggccgagtgctctgacgagcataaccgtcatctctacccgcgatactttacccgatgaacggaacgtatcatccgtgtacccactaatgatgccttgatccactgcctgagcaataaaggattgtgcccatgcaggtatcccagcagcatccttaaacgtcaatgacttgttgctggctggaagttcaaatgctcttcccaacatcacaatgaattcggcgcgtgtcgctggtgcattcggacggaaattaccatcctgatatccgttcacaattccccgggaaatggcctgtccaatggcagcagtcgcccagtgatttccgatgtccttcaggtccacaaccggtgtggttggattaggacttcctccattacccggaacggttggcgtagttgggtctgtaggattggttggtgtagtcggtgtggttggagttacaggcggggtaggtgttgtagaacctccaccactgttaccactgcccggattacttccattattgccgccaccattaccaggattgcttccatttccttcccccggaagtggcgctcccttcaaatccatactgcgtccttccgtcttttgatcgactgtacctacacggtccagatgttcatggaagatttcataatcgaccagattcaattcgtagaatcgattatcatcttttgccgttctcatagcacgatagaagtctccaccgttagccatgaatgaattggtagcgacgatataatacccgttcggatcgatatccgagtaggtaccatctgtattcttaatctgaactttgatcacacgttgaccgacttgggtcacggtattggtcgttgcatcaattttctcgcctggtttcgtggaatcgtagtagaaacgcatacccgctacttgcggaaaacgcccttctcccgtttccacaccactaacgccattttccaacgcggctgtgatttctttgcctgtcattttcaacgcagacagattattagcgaacggcatcacagtcaggagattgcccagcgtaatatcacctgtctggaatgaagcacgaatgccaccaccgttctggatcgcgacgtatcctttgacgtcgttttcctgcacaatggatttcactttctccagcataccgtctgtcatcaggtttcctaaattggtttcctgtttccgcacagtgccacgttctccatccaggaagacatttgttttaccgataatcgttttcttgaattgttccaactgaggggcatattctttcaacttgtttgcagcttccacatcatcagcataaatgaattggttgacagcatctttcgcatccagactcaacaatttgccgttccacttcttcaatatacccgcttcatcaaacgtaacatccaattgaccaagagaaacgtcatattccccggtttgcacaaccaatgttggctcatccaggctacccacaacaatcggttccttcagaatggtgtgtgaatgaccacctaccacaatatctatcccttctacggcttcagccaatttgagatcctctgaatagccaaggtgagtcaaagcaatgattttattgataccttcattttgcagcatctctacagttgcttgtgcacttgccttataatctacaaacttcaagtcatctcccggtgaagaaagagatactgtgtccggtgtcgtcagtccgaaaataccgacccgctcaccattcacttccgtaataatcgccggataaatctcagctttctcacccggatcaccgatgttattgttgtaaaagccactcaagctcgcatcctttgaataatcaatgttggcactcacgaacgggaactccgctttttcaataaatgctttcagtacgcttgggcctttatcaaactcatggttaccaaaggtcatggcatcatatccgatcatgttcatgaactccagatcagccagaccattaaacagattaaagtacaatgtaccagagaatacgtcccctgcatccagcaccaatgtattatcattgcgcgcttccttaattgccgttactcggcgcgggatgttatccagatgcgcatgcgtatcattcgtgtgcagtacgcgcaggttgaagtccccttcttccactggatctccaatactcaattgtgcaagcagtggatcatggtcgctcactcgtccatctgctgtctcaaaatcggcattcacatgtaccacttcaatggctgccgtctcagtcaggtttttactcaccaaaatgtgatccagtgtctgggagtttccatcatagatgtaggaataccgctgattttctggtagttcgtttaccaggttgtccagttcattaccttcaacaatgttcaaagtatccgagaattggaagtcattgaaatcaccgagaacggcgacattcacctcagggtctttgttcagtaactctttcacaaacccattcaccaatgcagcttgcttcgcacgttgaacttcactgctccgagtggcaggttgtatacttccaaaaggtttcaggtctccacctttggaattgaagtgattggcaatcaccactacacgtttaccattgaattcgaattcagcggcgagcggtttgcgggagctggcgaacgcctcgtcccctggtgcaatacgacccggattattggagagactgccatcagctttgactgtgatcgctgtcgtagcatttccttttccgataccattagccaacgatacacggttcggctgataaaggaaccctacacgaatattggcaccaggtgccccgccatccttgttattttccggagaaatctcactatatcgatatgttggtccgttgttcgttttgattgcatcaattagcgtctgaaaactctcattggacgctgttgtgcccgtgtcggcatcgccatcgttatcctgaacttccatgatgccaatgatgtctggcgtgttcagattatccacgatgattttaccgattttattggctcgtgttgaatcttttttgctgaagttctccacattaaacgtagcaatggtcagtttatctgccgcttgttcaatggaagtagtcgcttgtttcgtttctcccgggataactgctggtaaattcccttcaggactcaccttgaaatttccactagagtaggtcattactccgactacattaccatccaacttatcgcctgtttttactgctttggaaggtttcttgccgataaatagacgctgcggattgagatcactctcattcatatctttcttgttatcggtcagaataacaccaccgttaggtgtgcgaagtggattattctcaccattatccacaacaacggccagacccggttgactggagtaaggacctataatttcaggcttttccagttcaacacgcatgccttccaaactttcaaaaaagtctatagcatccgtctcgggattaaattctgcaaaagagtctgagtcaatgacggttggaattacacgtccattgacacccaacttcacaggtgcaggtagatctaccttatctattacttttacaatggcactcgccgtaatctgcgtggtggttaattcgttaaccgccccatattccgtaactttcccagataccttcacctgattgccaacgataactccatgacttggtttataaacctgaatggcttcggatgtccggttatcatcgtccatctcgcccggaagctcttgcatgtaaaaactgcttgtactgacagaggtaacaataccttcaatatccttaacatcgtatccgttaaaaacagaggtatgtcctgcgccctgaatatcatggatacgcacgttttctttatcaggaagtatttgatacgtaaaggtgtacactgcactggattgtccattaagaatggcaacagccttgattacgatgtcttgatcaatcactattggactactatacacggcggaagaagaagtaggctctgtattatccgtcgtgtaatgtacaactgcactcttggctggagaggttaatgtgacttcattgttccggggaatcccgccagatggaacacttgccatcacagacaggctattttctacaacatctgcggctgttctaggcaaaatctctaatccgtaattactgttgaatgtcagaacaccctgcacatattcgtaggttttgccaacagttagcgcggtaggagagtttttggcataaatcgtcatctcagcaccatgactatccgtagcgtaaaacgtcgaactactgccccgtgttacctgaatatctcttacttcgacaaacattccctcatacttttcgcccggacctttgttactttggtctgctggtctgacaaagtctgtggacaccatatttttgggtccggggagtgtcacattttgctcagtgaccttcatgtatccttcggtaaaacctgacttatccttctcgatctggacgagtccgctgtagtgggtaattggaccatacacttcaatgcgatcccccacatcaacctgattcttcgctcggactacaatgccagcttcttcgtcttgaatataataattcgtgaattctccggagagctcactgtacgttacgacacctgaaacggctacatttgtatttggtgcaaggactctcgcatcagcaatggatatgattccagtcccgtctggttcttcactttcagttccatcaaaatcaccatcttcgttagttggtgactctgtcccctccaggtctgacgattcttcagttgggacagtattcggtatggaagtctcctgatcacttgtgtgcggctcttccgttactacactttcctcatcagcatatgcggtgctacttaatccacctattggtgccgcacctgtaacgacaagaacgaaaaccagaaacccttgtgcccaacgtttcacttgcttgttgttcattcgtcctacccccatgttttcaacttggcaatcatttgttcagccagcttgtacattagttcaaatataagataactgaataacagacttgtgtaaacaatatttcttcgttatgaaagaaaatagaacactcatatcacatttttttaaactaacctctataataatgaataaatagtactaaattttaactaaaaacacgttattaagcctattaaagttatataaatgttagatatacggttacttaacgtcaattaaattgacatttatactgaatatatatacgaattcgacatttagtgacagtactcatttctttaaacccactaaatcctgagtcttgagacatgcattttcacatgataaaacgatatgtacggatcactttagctcaccacattaactgagtataaaagagaactgttaagcgcaaaatcagtatgagttaatagaatgttaaaaaaaaccacaagaacatctccaattactctcagagactttcttgtgggataatataaaatatgatactaatttcactttttcgaaatgttacagacggttttcaatacacttctgtgtctggtgtcaaagtaatattacttccatagggttcaattaatccttgttgctccaagtactggtcaacgtatcgatctgcattcagtgaagttgacccgatccagtctgaatatgtttttccaaacattttatatagtatgtcactagtatattcattacttaattccccaaaaacagtatacaactgttttaccgtatttgtgtgttttttcccctctaaatcggtccatgttacttttttattcagatctaccttccttatatccttagtatatatttgtacatttgacccattgattttgaagtacacacggatgcttttttcgtaaggatgacccttgagaatgctccaccctttcatatctccagtagctggcacagcataaagtttcccttttgttggagttgttcctgttacactgttttgtttttgaggttgttcaatattaatagtcattttacctttaccaatggatacttgcatctgcttagctttagagttataagtcacagttccatccagagcatctgagagaactgaagcaggaaacaaagttacgccattttgaacaagcagcggggacttgagagttaatggctctccatttaacgttgcttttgttcccgttttcgggagagttagtttggtagaaccaactttaatctcgaaggcgtcctgttgagcaatgtaactaacactccctcccagtgccttgaatacctctttcatcggaacaagagtcacaccattttttatgtatcctccatcaattgcttcatccaaactacctgaaatagtaactgatctttcaacattttcaactttaacagtaattgtcgaagaacctacacctattacctttaccatcccagtgctcagcacttgaagtatatgaggttcactgatcgtataatctgtttttgtaagacctgtatttcttctgtagtatggatcgttatcgctatgtattgaattttcgtcatcatacacaacaactatattaagattaatcttagaaccgaccgaaactgtagtattagggatgagttcaatatttttaactttaagttcctctccataaacacttgagacaaacaacaacataaataccatcattagaagcgttactcttttcattcacttgtactccttcttatttttaatattgtccattacttttcatgaatccatgtattgggatacccctttcagcttcctattctatttcggaatcattaacaaaaaatgttagtctttctttttagtaaaacaaaaaaattgaatgcagcttaatcactgcattcaacatggatatgaattaaattatttcttcaccgtgctgttatattgcgcaatcttgtctgtaatttgtttggctgctgcatccagtgcttcctgtggtgtaccttgtccattcaggaccgtttcaatcgctccttcgacaagttgtctggcttctgggaatacacccattaatgccccggatgttgctgtcgaatccgcggaagcgtgcaattggtcgactgctgtctggaattgcggatacttcgccatattatcctttaatacttgctcttcgtaggctgctgtcgtaatagggaagtatcctgtcgcaacgctccagttcgcttgcacctctggtgtagccaagtacttgatgaactcccatgctgcttgctgttgtgcttcggatttgttattcatgatgtacaagctcgctccacccaccacaacgccgccttctttggcatccgctggacgaggcaggaagcctgttcccagttcaaacttgcctcccgaaccttctacgattttacgcaggccagccgtggaatcgagggtcataccgatttgctgagctgtaaatgcagctgttgtatcgtctgtgctacgtcccagattagagagggtcttctcatcaatcatctttttccaccacgttaaagtcttcactccagcttcggagttcaacagagactctgtagctgcttcatttcttccgtttccattgtttacataatctgcattctggtttgcaaagaactgttccataaaccagccgtagatcgccatggatgcacctggcttaccgtctttcgccagtgcttttgctgcttgctcaaactcttcatacgtcttcggcgggttctccgggtccagacctgctgctttgaacatatccttgttgtaatacaggatcgggttggatgtattaaacggcatggcgttcaatttgccatcgatggtgtagtatcggatgatgtttggctccagttgggacaggtcgaactgatccttgtcgatgaactgttgtactggcgtaatcatgcccgaatcgatcatgaacttgctaccaatctcatagacctggataatgtctggaccgctgtctgagcccatggatgctttgagtttgttcagactttcatcgtacttcccttgatagatgggtttcacctgaatgtcgggatggctagcgttaaaatcggaagcgagttggttaatggctttctccccagcgccagacatggaatgccaccacgtcaattgtgttgtttcagctgcggccgcttctgcttgtgctccacttgccgggctgcttatttcagcttttgttccgcaagcggaaatgaccaacatgagtgcagccagcattaatgcgaatgttcctctttttttcaaacgaaatcgctctccttttatatggctcgcgtacaataaaatcttggggatgacgcggtgtggccgttacggttacgaatcgttcttttgatcgctgttatccccggatttcttttcattccctttcaaagggggaaatccggggataaaggcgaacgctttgcttcttcagaatcgatttcgtcccctccactactaccgtcgttcatttcaacattttatttgaagcacgagcctcattttattcgctcctggtatccaaaccgtggaccttgtaagaagatacaaggtttaattcaaaacctctaaattaaaatctttagatcaaaaccttcagagcttccacttcaattcaactaaatagttgtaaaactttcattgcctaccctttcagcgcgcctgcggccattccgcgaacaagctgtttcaacccgaagatcaatagcagcaaggatggtagaatgaccattgctgttccggcaaataccagattccacgcggtggattcctggaactccagcatcgagatcccgatctgtgcggttctcatttccggtgtgtttgtcaccagcagcggccagagatacgaattgtacatgcttaagaatgaatagattgccagtgtacccagtgccggacgggacaaaggcaagacgtgcgatatgaaataacgaatatgaccacaaccgtcgatcctcgccgcctcgaacaattccttgggtagttgcatgaagaactgtcttagcaggaatgtaccaaacgccgttgccagaaacggcacggtaagcccctggtaactatctagccagccccaactgcgaaccgtcaggtagttggggatcatcgtcacttcccatggaatcatcatggtggcgacaaacatgctgaagatgacgtttttgcctttgaacttcattttcgcaaaagcataggctgccatactcgctgtaatcaattgaccaagcgttgtcagtcctgcgacaagaaaggtattgccgataaatcgaccgatcggaacaatatcaaatacttcgctaaagttggacagatcgattgaatttggaatgatatgcggcggataagcactcgcatcttccggcgtcatcacggccatgaaaaaggtgtacatcaccggatacagcacaagcgccgcacagatggtcagtaatacatacaacagcgttttggtccatgtcgcactcattggtaatgcactttcctttctacccatttgaactggatcagggtcagcagcataatcaccacgaacaggatcagtgcctgtgcactacctgtaccaaagcggaaattaacaaaggcttcctgatagatggaatagacaaaaacatttgtactgtccatcgggccaccccgggttagaatgttgatctgaccgaacgattgaaaagcaccaatgattgatacaaccgtgacaaagaacaacgttggtgacagtagcggcatcgagattttgcgaaaagtaagtactggacctgcgccgtcaatcttggcactttcatagatctcatccgggatgcctgccagaccactggatagaataatgtagttgaaccctagattcatccagattgtcatgatggaaatcgagatcaatgcccaatccgggctggtaagccaaggaattggatccatacctactttgccaagcagataattcaacatgcccagggtcggatggaatagaaacttccagatcaccgctgacgaaccgacggataacaccacgggcagagagaatacaaattggaacacacgcattcccttgaaccggttgtgagtcagtgcagccagaatcagagcagccagcatgcccgtggggactgtaaacaggacaaatagtaacgtcactttcatcccttgcataaacagtcctgattggaacacggccttgaagttatccagtcctacataagctgcaatctgtcccgtcggatctgtggaatgcagactgaggtacaccgacttaaacatcgggtaaaacagaaacactgcaaacaaaagcagcgatggtgccaggaaaccataggccagcagattctcccgcattcgctgcacacgcagcgaggctgtccggcgcgcactcgtacctgatacacgccgtttggcggcgggtaagctgatccggttatcaagctcactcatcggattttcttcccccttgtttcacgcattcagtgtgtgtgaaatgttacatcaacttcagcaccacgttatctagtgtaagagtcgaatgtcacagcaaaattcattctgaatcaacgtaacgttaatcatggacaagggactttacgcaaatgtgtatccattcgaaagcggtatccacaccggatttcaagataaaaaaaccgcaagaactctcctttttggagatatccctgcggtttgatgtgtaaatggaatatgaacgtttgcctattaaagaacgtgactcattttacaataatctgtaaatcttccaaacgaggtgaagcgagtaatccttcgaattaacgattaagatgatatggcaccgtggtgacaattacgtccttgtaattgatcagataggcccggatcatgaagctggtctggttgtgcagtacattttgccaccagtgcttggtgatgaattgcggaatcaatatggtgatgtgatcggtctcggccgttttccactctacagtatcaatgaatttcttgagcggccccataatgctgcggtatctcgatttgatcacgaccagacgaacacctggattccactcctcccacttctgctccatcttgcgtatggcctcatcatcgaagccaatgtacagcgcgaccacgtgatccgacatcgtctgggcgtaactgattgtgttcataacgacccgggtaattcctgcaacaggaatgactatggtattgccttttttggctggcttatcgacctgaatatcaatccgtagctcatcggcaatgttgcaataatgacggtgaatacgcatgaacacataaacaacgagtggcaaaaagataaagatgacccatgtctgcgtgaatttggtgaaaataaagatcagggtaatcgatagtgtagtcagcataccgacggtattgaccagcaacttcatctgccagccagacggtttgactttgatccagcgaatcatcataccgagctgtgacagcgtaaatggaatgaacacccctaccgcatagagcggaatcaggctttccgtattccctttgaacccgaccaccagcagcgcagacatcacactgagaaaaatgatcccgttcgagaagcccaggcggtctcctctgaccataaatgcatgcggcatgtatttatcctttgccatcatgaaggataacagcggaaaagccgaataagctgtgttggcagcgaggaacaggatcagtgccgttacaccctggatgataaaatacatcgtgcccctgccaaacgtcgcttcagcaatctgggaaatgaccgttgctttgggatcaggcttcactccgtacccataagccagtaaggtgattccgatgaacatggctcccaatatacaacccatgagcagtaatgtacccgcggcatttttctcggcaggctgcttgaagttcgggattgcgttacttaccgcttccacgccagtcaaggccgaacaaccggagctgaatgctttcagtaacagaaacatactcacatgggatagacttgttccgaattcaggtgcagctgcttccatccccccggcaagaaatttgattccgcccgagataatcagaaccgcaatcgaaaagataaacagataaatcgggatcgccagcacagacgctgactccgttactccccgcaaattcataatcgttagaaaaactatcataatcagagcaatcacaacactgtagtcatgcagcataggaaaagccgacgtaatcgcatccgtccctgcggacgaacttaccgcaacggtcagaatataatcgaccagcagagatcctccggcaatcagactggatgttgtacccaggttatccttggctacgatataagcgccgccccctgttggataagcaaatatcgtctggcgataggaaaaaattaaaatgacgagtaatcccagcacggcgatggaaatcggaacagaataccacagggcagcgaatccggccgcaacgagcaccagcaaaatctgttccgtaccgtaggcaacggacgatagggcatccgaggacaggatggcgagtgccttccatttccccaatttttctccatccagttcagccgatttcatgggcttgcctattaagattctcttcattttgccaagcatgatcataacttccttccgtctctcatctgtgaagcattgttattatgcaaaatcgcagagccattgacaatacgtcatttcacccgaaattcgccagcgcgtgataatgcattctacgattcaataatcgataacaaagccattcttgttcagcaatttgaacttttttgaaccaaaatgacgattgttcgtcaaaaaaaaggaaatggcctttggttcattgaaccaaagaccacttccttgatctatgcgttgactataatgtaatacaacatcctgtatctaacctgcccaaacacgtgcagcttccttcttcagcttatattaactgcctataatgccgagacgaggggtaacgccaaacgcttgcgccagtgtagtcaactgttcatccgtaattctctgccggatctcgtgaccagcaaccagcatatacacctgggctgccttctcgatggtctcaatcagaccaaatgcctcgtcaatcgttgttcctgttccaaagatgccatgttgcggccagatgaccgcgtggtattctttcattttctcagccgtttcgcggccaatctcattcgatccagggatcatccatggaataatgccaatcccatccgggaatacaaccacacactccgtgcacatctgccagagggtcttagtgaattttgcctcatccaattcgtgggtaaacgtcatagccaatacatgagtggcatggttgtgcatgacaacccggtggttggggtccaatttcaaacgttcgatatggctcataaaatgcgtaggtaactcacttgttggcttcgcccccgacttcaatccccagagcacttccagctcctgtccatcctgcgatacacgcagcaaccccagattactctccggatcagcgagtacatttttgaaatatttgcccgatgcggtcacgataaaatacttgcctgccagctcctgcaccgaaaatgccggtttgatcttgcgtatcacatgatggatatcgatatattgggctacttcctcttcctccagcagatagctgacattaccgccattacgctcatcccagccatttttccacatatgttgtgtaatctcagccatctcacggacaaatggaatatggaaacctgcagcctgcgttgtttcattggtaagggtcacgttcatgatcaatctctccttatattgaaaatcaaatggcttgcctcgtacatagtaagttccttatttcacattcattatacctttgtttatctttgatagtcaataacaaacacagaaatatacttttgattgtttttgtttagttttgtttatttgaaaataaaacaaaaaaataccccaccggcgcccggcggggtcagtcacacatctatttaacacgagaaggggtttacaagacttatcttacctctgctaccttaatagaagctgaaagcgaaataaaaaaagcatgaaaacatatattcccttcggacagaagattcagttcctccttttcattcagtacacatatctctctgtccaaacgctttcgtcaattctaacatatgctattctagcttttctcaggaaaagacattcataaaaaaaaggagatgaacctatggcagtcctttctacaggcccgatcgagaacaacctctccggtggcagcagacctacacaacaagtcactatcaaaatggtcaacaccgattccatcaatacgtccaatgtactcattgaaggttatttcctgaatggaacgaggaccttatatgtgctgcaatccgttaatctgacccccgggcaagtcttctctcaaacctactatgccaacctggatggatacgaatatgtattcacaacaggtggaggcgcagctgcatcaactgaaatttcagtgtggggaaaagacagcactgggcaaatcgtcaccgcacatcgtattgtttcgaatgaactaactctataaaaaaaggaaactagatgccctcaatccctgtccttcatcggtcggggggttcttattttcgcagcacatacgatggatgcatctttcctgtcggttcataacgttcatcacctgtatactcaaatcccagcttgatcaagatgtgacgtgacacttcattatccggatgatgcccggcaaacagtgcattcacgttcattttgtcaaaggcatacgcaatcaccgcacgcgctgcttcctgggcataccctttgccccagtgatcccgggttagatggaatcccagttcatacatatcctcttctgaagaatacggacgcaggccacaacagcccacaaacacctcggactctttctcaaaaaggggccaatattgcacacccgcttccttctgcctttgaatctcctgtgtcaatcgtgcttctacttcatcctcactcagaaatcccttgctgctaatccatttggcaacctcatgatcgccccacaatgcaaacgccagcgcacgatctccttcgttccaagtcgcacattccaaccgttccgtttcaaataagattgttctattcatcatccactaacctcctgtatgccaacaccagttcacgtgcagcttataccttaaattaatcgaatgaccgtcaggataaacaacatttataatctgtatacgttcataccttctaattacacttataattgcttagccaatttctcaaattgattgatgtgaggcttgatctctttttctacactttttataaaagaactaaattgcttgcgatcatactcatctccaacaccaacacttttatatacttttcccttttggtatgtaaacgagaagaaatagttattctttaatccattcaaaatatttccggcatctcccaagattttaagactcattttcgaatctttgtaagcaaacgaatatggagggtctgctactgctgcatgctgaatatcatacccagttacccattgatctttgacaaacaccccactctgaagacgtattcttaacatcacatcatccagagaagttttttttatctcaagttcacctttaccatcctttttgtcactcttccagttcccatcatactttgactctgtaatactatcctctccgcgtgttataactttatatacgccgtgtcccgaacgtttcccctgtgcccagctccctttgtaagttttggttttcccccaagtcatagttccattcccgtgaggttttccatttttggtctctccataatatgtagccccattgccatactccagagtagccaactcagtcgccgcctgagcaacatgtggtgacaggattgcagacaatcctaaggttacccccaaaatatagatgaacatctttctaaacatcaaatctccctttctcttgctgtataagaaattcattcttataacaacctattaatcaaataataagactctagtataatatcactttcaatccagaaggttccacataaaaagaaaaacccctgccgacaagatgtccgacagaggccgttccaatccagttcacatcaattacaaatctgctacggcgaattgaattgttccggaagctgcgcctccaaggttagctaacaaggcaaacaccagaactccacctgcagaaatggtaaggctgctgtttacaggaacaacgtaagtgactactggtgcattaacacgtgtgatcacgagagataccggaaaaggtccagcgttgttcactgtagcgctggcatttgtgcctcctgccaggttttcgtagtaggacttgcctgctccggcaggaaggttgtaattttgtatcggtaaaaggatggccattgaaatcacctcctttttgctttgatacggtattctatgcttgaaatctattaaagcaacggtgaattaccagggtcataatgtccaattttgatagactccatagattgatagacgaatgtacgcaaaaaaagccccaccggaccatccggtggagccaactaagcttactttaatattacaggtttaattacgcatacagcatgaaaaagttcagttcatggccctgctgcttgagatagttatacagctgcgaacggtgatggaatacatgcgttaccgtttcaatctgccattgaacctgcaagtgaccatgttccatataaaaagcttttgttgaacgattcaaaaagtcgtcttcgctcaatcccgtgatataggttttgtaggattcgaaattgctccataatgttgcttcaagcttctcgatatcctcaatcccggacaggctattctccaccagcccaacctcagcctcacctttttcctgcataatggcaagatcggatgcggtaatctggataaagtgatgtactagctccaccaatgaacgcatgttcccctgtggacgatacgaccaatcctccgaacggatcaagcgaattaacgaagcccccgtccgtacccctgtttccaattcatttaacaagtgatcccgaatctgcaatgttccattcatatatgatgtctcccttatcttttattctcacaactcagtataaccgaaggtgctacagatctattgtacaaatcggacaacattctgccatgctccctagctgccgtcaacggagtctctccataaaacttgcgaaattgccgaattagatgggcttggtcaaaaaatccatgattctgggcaagcattgcccagtctgccgtgttcccctgatgaatatcactcaacacacgatgaaaacgaaccacctcactgaatcgcttggggctgattccaacccattccgagaacttgcgatgcagctgccgttcacttatcacttcacgcatcgccagctcttggacactcatacgtcccccatctataaagatgcggtgcagcacgtttttcatcagatcgttctcagacgtacttgcctgcacagacattggactcaagtacgcattcataacctccactcgctctgcaaaatgattcgtttcggccatccgttcctgaagctcgttcagcttctccggccaacattcctgaagggcaattcgcttatccgtaaaccactccagaggcatgccatggaagacatgcgctccgcccgggaagaaccggataccaaaggtgtagtctccagcaggggaaccatcatcggatggctcaggtacagcaaacggctgtgtataattgccacagtaagcataggagtgctctgaacagaccgggtcgtatgtaatcagcatgtccgtgcaaccatccggcaatacccgggcaggtgccgtcgtcatcgttcgctctggaccttcactattagcaacatccgcatgtgtgttcggaagagatcctgattcccaataacaggccacataagccatcaagccggcagcaggtattttctcaacataataactgttagggtacgttccatttatctgaataggcttaaacaacgggtgcaagctgtgatccacaattccatcctccgatcactagagttggttacacattatgtattcatctatcataccaccaaccgaagaaatgaagaaaaaaagtgccctaccggaggacaatccgatagggccagtcacacatctatttaacacgagaaggggtttacaagacttatcttaccttcccaaccttaataaaaactgaaattgggatgaaaagaacatcaatttttcttatagtacgtgttcaaaaagaccgtttttgaacaacctcttaaagtgtcttgatcagtatggacgcaattaacacggatgctgttgtgaccgttgtgaatccacctaccagcattggcgttaaaatctcatcgaggatggctttgcgttcattttcatcacgtccaactgaacggcttacttcctcacagataatgtagtcccccggaaaaccgaatagtgcagtcagtgccacaggcagacctttgagcgggtcccatttgaacagcttggagccaacaaatccaccgatcagaaccccaattacaccgattgcgataatgaacaacactggaataatggaactaaccaccgcatcgaaagtgatcgactccatacttgtcataacgactacgatcagacctatcatggcaattcccgatgtacttgctttatccagaatacgagatgggaacagtccgatcagatgtccgagaaccccaagcaacagagcccagatactgtagctaagtccggttatattgcccagataaatggatagactgcccataatgaacaagagcaacagcaggataggtgcggtttggaatcgctgtggaaggaatgttttggcattcgcttctttaatgttcacatgtccttcccctgcaaccttgttttcaaatgcgccctgcttctgcagttttaacgcatatctgcgcaacatattggttgcaatcggcatccccacgagggaatgaatacccagaatgacagccggaattgtaatcagatgacccaagttcatctcctgcaacttcgtggttgtgatcagataagagataatgccaccaacaaccggacttgatccggcaacagctgtaggataaccatagatcggtgatacgatcaacaggatcagacctgtcgccgtgagtgatgcgaacagtgagatcagtattgctttatattgggaccgtattaatttcagcggtattaatgtccccatgtgtacaatcagcggagccaccatgagagccccgaacgcagtcaaagcagagctggagaccactcctttgggaaataaacccgcccagttcagcagcaaatatccgatcagaataacaagcaaggacggaattcgcgctttggaccagatcgaaaccagttcccctatagctaaaataacaagtaatactgtagcgatatatatcggttgactaaacatggtggcttctccccattctctatgttgtcagttcagtacacgtggaaccatctttcttatttcaagcgttcacctgataaatagacctgttcgatattctctgtgtgttcgagaagtccaatatccgtcaacggattcacattcaataccagcagatcagcagctttgccaggctcaatcgtaccgatctccgcttccatctgcatcgctctcgccgcatctcttgttgcggctacgatcgcttccatcggcgtaaatccaacatcttcaacaagcaatcgcagttcgagtgcattcccgccatgctcaacaggtgcacacgtgcagaaatctgtccctactgcaatggttacgcctgccttacgcgcgataatcatgttctcaatatgctcctgatatacactttgggctttgcggatgccaaattcgggaacaccgtatttatgcccttctttgatgatccgatgtacaatggccagcgttggaaccagaaccgccttttgatccagcatcatgccaatgccttcttcatcaatgtagatcccgtgttcaatggtgcgtacgccagcttccagcgcatttttgatcccctgtgcaccttgcgcatgtgcagccacataagactgcaccgcttccgcttcatacacgattgccttcagctcatccatgcggaattgtgaccagcgagggtcatctttctccgaaagtaccccgcctgtggaacacactttaatgaaatctgccccttcacggaactgcgtgcgtgttgccttaatgacttccggaacgccgtcacacacggtgaagatattcagttccgttggaatcatatggatatctgcatgcccacccgtctgagagagcatatgacgggaagttttaatccgcggccccttcaccacaccttccttgatcagatcgcgaatgtatacagcaacgtggctacccacatccctgacggttgtaaaacccgcgttgatcagcttcggcagatcctgaagtgctctccccatctggagttcattggcttccagcgccaccgcagccatattcagatttttggccccgtgtacatggacatgggcatcgattaatcctggcatcaccgttttgccttttacatcaacaagctcggcattttccggaattggaacggttactttcgcacccgctgctatgaatttcccgttctcaaccaggaccacactatcggaaacaggctctccaccttgtccatcaatcaacaatgcacctacaaaagcagtaatttgactcatctgtactccacctcattttcagacttggttgtaagttcaactaaagaatattcacactcccactccgatgacagaataaccttccgatcgctgttatccccagatttttttgattcccttctccaatgggaaaatccggggatagcctatgcttccgaagtagctttcttgcgaaagcttttaggcgaacgctttgcttcttcacgttatttctgtcctctccgttctcgtgtaaaaagttaagttgaacttaaatattacgtgtacatgttcgatttacagctctactgttgtactacaatgaaattgtatcgtgttaaagttaatgacattatataagttgcaaatgtataatgtcattgttgatagcaacagcattttaatattaattatggtgatatacacaatacaaaatataaatcacacagcatagtgaagatcatgttatatatgtaagtacttttccatgtgaacacgaaggggggacgtttgctatgattcatgaagcggttcgctcatttatggttcaggtctttggagctgctccgtacggaatctggatcaaggatgaatacgatttccagtggaataactggctgcgtgaaggagaggtacctgaatatacagatcaagaacagatcgagtcttcctggaagattctcaggtatacgtttgtttttttgtccaatatcaacattcgtgtggttatcgatacccagaagcaacttactctgctacagagtgaacgtctggagtctttgattcgggaaggactgctgaagcagcagattgagatggaacgtgcgcacaatgatcgttggttgaccggactgcgggagctgacctgttccctggagctgaacgacttgttactcaaaatcatggagaatgcgctccatgtcatcccctccctttcctgcggactgttcatgatggttgatccggactctggcaagatgattcctagagccaaagtcggttttcaggatagtgtgtatcaatatcagggcgagctggatgagggtattacgggaaaagtatacgaggaaggcactggccgaatgtatagcacaccggatgatgcctttaaggatatgggcaatgtcagtcaggagaatgcagatatcattgtaagttcactgcctgacggtattatggccaaagggcttatcgccgttccagtgacaatgaacacccacaaaatcggggtgatgctggtataccaatttgaacaaaacagacgatttgccccacatgatctgaatgtaatgcaggggtttgcggatcaggcagccattgccatctccaacgccaccatgtattcagaactgctggaaacgaaccgatatctcgttagccgcaatgaaattcataatcaattcacggcactttccattgaacatgtgagcctcggacatatcattgagacggttggatcgatgctgaaacttcccacctattatgtggatatggcgagaaatgactggtacccgatcatcccggaaagtgtcttgctaagtgagctcgatatttataccgttctggacagtcagtttaaccccatcaccttatccggtggaaatgatcatagcgattattacctgtatcccattgtgaatggatctctggtgcttggctgttttgccatccagttagatcatccgttaggccagttggatcatgtgattttggaacaaggcggagctattgtaatgctggagatggtgaatacctactcactcaccgagatgtcctatcggaaaaaccatgattttttcagcgatctcgtgcaatatagagaaccacagcagttggaggcacgactttccagctttcagttgccagcccatcagtccttgttcgtcgcacaattgcagctgtatggggaacatcctgatatgaaaacaactgaaatttgggtgcgcaaattgattggctttatcgaaaaggaactaggcacccgtgaacatctattgttcagtgcacatcacaaaattacgattctggctgctgcatccgagcccaaggtcagacactcgatcatcagcaagttggaaacggctgtggagaaatggaccacctccaagactcctgccctatccattggtatcggtggactttatcaagggcttgagtatgtgtgcaaaagcaatgacgaggctacacgctcattgtcctttttgctgaaacaaaacaaagcgggcctgatgctctacgaagaaatcgggatcaaccggttgtttcttaatcaggaaccttccgatatcgagaactacattcacgaaattctgtcccctcttcaacagcaaaaatcaggagagcttgaactcacactcaaaacttatattgctgcgaatcgatctgtgcaagccacagcagaacgtttgcatattcataccaatacgctgtatctgcgcctgcgcaaaatagaggagattctaggtattgatctgaacgattccgagggttggatgaaagtgtatctggcatgtcatttaagtgaagtgtactctgttgctcctaccgccagtggagcattaaaattgtaactccatcaattcagtccgtgcagtttgcgaaaacgctctggactcatgcctgtatgccttttaaacatcgcacagaaataactggcattctcgtaacccacccgatcagcaacttcatatattcgaagctctctctcactgaacatgagttgtttgcttcgattgatccgttcctggttcacgtaaaatacaggtctggtatggagtgccctctgaaacagcctgcacaaatattggggagataccaccgccacatcggccagttctttcagcgaaagcgaacgatccagatgctctgcgatataacgcagcacaggcttcaaacgctccagttcatcattataattggcggatgcaatgagtagtggcttcagatccagcagcagggcatataattgtttggagcattccacatcgtaatctgcgtaatccgtagtatccccattctctcctctaaccagaagttgctccaggccacgcagcagcgtggctgtcctgagtctgcatacgcgtgaaccggttatccccgcataagataataactggctggcttctctcccctgaaacgagacccacgccagttcccaacggtcactgatgggcatatatcgatgcgggacatcgggatacagaaagaaaacgtcacccggtccaacgatatactcgtcttcttgtataatcagtctcccctgaccatgaataatctggtggatctgataatccgggaatccctctggacgctcggtttcatattggtgttcccagtaaccaaccgtggtcatatagatcggcaggcgagcagcttcttctgttttaccaaaaaaaatccgggtatccatccagtacaccactttcttcatcgttagtttcatattgtgatatatatgggcaatattctttattctctaagtcatcattcaattctataatgacaatattataacatttcagaaggagttgctgttatgcgaaagaaactggtacacacccctccggcaaatggatacccggaatggaacaacaatcccgagacttttcaagtaaaccgtctacccgcacatgcttctatggtagcgtttccatctgtaacagaagcattgtccaatgattccagcgcatcgccatggtacgaatcactgaatggtcaatggaagtttgcctttgcggagacaccggagcaacggattacatccttttatgagaacaactatgatgccagtgactgggacgagatcgccgttccttccaactggcagctgcaaggttacgattatccccaatatacaaatatgacgtatccgtgggtcgaacgtgagcctgaattgaagccaccatttgcaccaacaacttataatccggtgggttcgtacatccgcacgtttactgttcctgctgactggaaagaccgtcctgtcttgctgcactttgagggcgttgaatctgccttttatgtatgggtgaacggagagctggtcggttatagtgaagacacgttcacacccgcagaattcgatatcacttcgtatctaacggaaggtgagaacaagctcgctgtggaggtatatcgctggtgtgatgcgagctggctggagaatcaggatttctggcggttaagcggcatcttccgtggtgtatatttgcattcaccttcaccggttcagatcgcggatttctttgttcgtactgaactggatgaggcgtaccaggatgcggagctactactggatttaaaattatttaatcataatgccgcgcagaatactgccggattgtccgttcaggcacagctctatgatgcacagcagaagactgtactgaagcaaccacttactgcggccgttactttccaaggtgaggatgaactttcatttaatttgtcagcagaggttataaagccgcttctatggagcgccgagacccctcatctatatacacttgtactatccattgagaatgaatcgggcgaaacgtttgaggctgttcgcagccggatcggattccgcaagtttgaactgaaggacggcctgatgcaaatcaatggcaaacgcattgtgtttaaaggcgtcaatcgtcatgaattttccccggataagggtcgagccattgggcgggaagacatgatccgtgacatcgagttgatgaagtcctataacgttaacgccgtgcgcacatcccattatccgaatcagtcactctggtacgaactgtgtgatgaatatggcctctatgtcattgacgaaacgaatctggaaactcacggtacctgggaatatgggcaaaaggaaatgaacgagaacaatattcccgcgagcaagcccgaatggcgtaataacgtaatcgatcgctgtaactcgatgttccagcgggacaaaaaccatccgtccgttattatctggtctttgggtaatgaatccttcggtggcgataacttcatcgccatgtacgattatctgaaacaggtcgatccaacccgtctcgttcattatgaagggactttccattatcgtccttccgattcggcaagcgacattgaatcgacgatgtatatcagcccacaagatgtagagaattatgctcgcatgaagggtccgaagaaaccttatattatctgcgaatatagccatgccatgggtaactcctgtggaggtctgcatctgtattgggatttgttcgataaatatgatgtgttgcagggtgcattcatctgggactgggtcgatcagtccattcgtaccactacggcagacggtgtagaatatttcgcttatggcggagatttcggtgaatcccctcatgatggcaatttctgcgggaacggattgattcttgccgataagacagttacaccgaagctggaagaagtgaagaaatgttatcagaacgttcgtatggaaaccgttgatgtaaaagatggcctactgcgcatcaaaaaccagttcctgttcacggatctgagtgaatattcgctcgtatggacagtaacacacgatggtgtatctgtagaaaacggcacgctggatatcgcggtacctcctggcgaatcggttgaagtccgcatcccatatacgccatcgtccgatctgttccacgaagcggtgctgactgtatctctggttacgaaagtcgcaaccaaatgggcaggagtaggtcatgagattgcctgggatcagttcgtggtatctccacgattgcgtccaatccaagcggtacatcaagggcaaggcaatgcgccgcaggtacaggatctgcaagatgaattgaaagtgacaacggataaagtaaccttgagcttcaatccagctacaggcgcgttaacgtcctatcagaccaacaatcaggagcaattgaccgcacctgtccggccgaatttctggagagccatgacagataatgatatggggaaccgcctgaatgagcgttctgcgttctggagagatgctcacgctactagcagattaattcgcttcgaacaccatgcagacgaacaaggcattctcgtgacgaccgattatacttgggattcacatccgggatgtacgctctcaatcacgtatcaaatcgatccggatggcgtactcgaaatcagccaaactcttattccaggcgtcggcttaccagatctaccggaattcggtatgctgctgcaactgaatgacagcttggatacgatatcctggtacggcagaggaccgcacgataactatgcagaccgtctagccagtgcacgtctcggttattacacaggtgcagttcaagatcaattcgttccatacctgaaaccacaagagtgtggtaacaaaacggatgtacgctttgctggaattacgtcagcggatggtcagcttggcctgcatgttgaagccaccataccatttgaaatcaatgcgttgccgtggacacctgaggagctggaagcaaacgatcatgtgtacaaattacctcagagcacacaaaccgttgcccgcatcaattacaaacaaatgggtgttggcggcgatgacagctggggtgcacgtacccacgctgaatacaccttgccagccaaccgcgcgtatcacttcacctttacggtaaaacctgtataacatcaagcaagcactgctggcagtatgccggcagtgctttttttgtattcatacaatcttacattattgaaagattcgtgaaagatagatacataggagttacaaccaacattgattatactttaaaccaacaagatgctgacaatgaatatataaaataaatggaggggttacaaatggatctaatacagattataggcagaatattgcctatcttaactattgcattggctgcgggagttgttgtaatcggtattacttattccgtatatattgcatacaaaaaaagagggggtaaacgaagcatagcccgcaggcaatttatagcgtcatttttgctcttgggttggtttgttattgtcatgactttaaccacatttagcagaggagctaattatgagggttggatcaatttagagctattcagtggctatataaatgcatggaatcaatggtcgttgagcgaattccagctcatcatttttaacatgttgatgttcgcaccactcggtttcatacttccgcatatcggaatgaaaacgcgtcaccttaaggccgtgctactcatatcgctgttggtaacgttgggtatcgaaatttttcaaatgagcaccggcagggggatatttgaacttgatgatattctacataatacactaggtagtgtggcaggatatttgttgatgagagcgatcctcgacagtgttgagcaaagaaagatcaccttaagatcactatggaaggcactctgcataccactagtttttacgatgcttttttccagtgcttttatcatttatcacaacaaagaacttggtaatctctccatacgtccagctatttctcaaaatatgaatcaagtcgaaatcacgcttaacacaaggttacctgatgaggccgagaaagtgtctctttatcgcagtagtgaaattcacaacctggaatatgccaaacgagttgcctctctaatgaaggattattttgaattacatcagaaaggtagcatatctattgatggatacaaccgaatttggacttttcttgacaatatgggaactgaatatacctttaattatgacgtcagtagcggcacatggtggctggcatctaatatcgaagcaagcactcctgtaaaaccggaagatttaatcaaacaaggacaagagtatggcagttggttgactcagaatgacttattgcctaataaagcgatattcagtacgcaaaatggagacacggttcgatgggatatcgaaaacacagttacagatatcgcgaagggtgacagcgattatgataccggactaattatgattgtcccatcagcagaacctatgattcctcagaatttattgtactctatgaataaaaatatttatgtgcgagtggttgatattatcagtccggctgaggcatacgaagaaattcccaagggaaacttttcgatctataacaacttaaagaaaggagacaaactaagtgtgaacaagtatgaactgacttacacctatgattcgaaaggttattatcagccagtttatcgattcgaaggagagatcaatggagagcattgggatgctttgatcccagcagtaatgaattgatttcagcttctgcctgccttgatgtatgagtttgaagtttttcatgagaacattataataaatggggtgcttgaacgatgaatatattttgattacgaggtgagaatttgcaatatctgtttaccgctcttttcattcttggtttcattgctttcttgggatttcttgttctgatgatcttatctatgcgcaaaggtaataggttgccgatcagatatatttttctaacgacggcttgttttgcgattgcttcaataggattgtatggcatgctgactttatcttcgaaccctactcagtctgaaatagatcaggcggtggaacacgaatcaagtgacgctacaacagaaaaaaatccggctacttcaccccagattaaactttctggcctccatatgactaccgatgaatttaaaaacaagtttaatggcgccgtaggcaaataccgactgaatgggttgagtattacccgcttgaatatgaataactcttctgagcagggcactggcgctttcgattatatattcaatgatgaattgcgcttggttggtgtagtgaatgcagatgagagcgtacaggaagtccggttatatggaactggtgatacgagcgaaccaacgggtggagtttttttgaccgctatcgccacactcattctcacaaccaatagtgagtacacgtataacgatgcacaagatgtcatccaggatattggtctattggatcgcgatgtgaatcagtctgattttgatgaagcgacggttcgaaacagattggaatatcgcttcaacgtacaggatcatgatcactcgacttttgaaataactgttgcgaaataagatgcgattgtgcaaaaaggccgctccatgaaggaacggcctaaggtgtgatatgtactttttttggataattcagtagtcacagtctctgatctaacattttcctattttatggattagtaagccaaaaaattaaagtaatcactatacaaaaaagcgatacagggtacaatgtccatttactgatcttatctttgtaagtgacaatccaacaaacaatgcatatccaggcgattaatagttgccataagtccaatgatgaacacctccactatgagagagttactcaaaagttacaatctcgctcttattgttccagctcattttaaaggtaattggatctttcgttttctccgcctcagtaaccgtccccgacatactgaacggtaccccttgttcctcaagcgctttcccctgttgttttatattattgccggtaaggtcaaacacaaaatcttttatacgcttttcatcacctatataagtaatcctatagctccctgtcgatctctgaagagacacatcccagttatcgctttttccatgtaacctatcatccgcaccacaagctgagacaatagataaaagtaatataacacaaagaatgattggcagtttaaataatttcataaaatccctccttttaggaatatacccaaaaatgtgagttatgatatttgctaatcattcctaagcatctactctagtataatgtgtcttacctttgaatcacatgactaacgatcttctgagcatcgtatttaacccatcccaacagtgctgaaccccgagatgtttgccaaggtaaccctacaaagtacagcccagcaaccggtgatacgcctctctcgtgtataattataccttgggcatcaaaagcagtattgatatcgatccaactatcatttcgtttgaacccagtcgcccaaataatattgtctactgctgtctcactaccatcctcatacaggatgcgatcatctattgcattaatggtacgtgggcgcaggttaattttgccctgggtcatcaactcttttaactcatagccatagacgtactctggctgatttcgcaaccattttccaaccatatggtctgcacttgcacgtaatattccgagcttttcaaaataccagaatatacttcgtctcataatatgcaaaggcctaaaggtaatatttcgagctatggatatgtatacggtttgtttatcatctgatgttaactctacggcgatttgggcacctgaatttcctccacctacaactactgttgttccaggaagcaattgagacatattcttatactctgatgaatgaagctgaattacactctcggataataatttcgcaaaatgaggaacatttttggtctggaaaggccccgtcgcaacgataatattgtgcgcttcaatcattccatcattggtttcagcatagtacaccttatcttgtttcgagagacgcgagatttcacagtttaactttataggaagatgcattctcttggcgtaactttcaaaataatctgcaatttcatctttgcttggcaggccattttcattccccctaagcggcattcccggtaacccatcatacattcgtggagtaaacagatgcaaggaatcgtaccgtttacgccaagactccccgacagatgaggcagcgtcgacaattaaaaaggttaaccccgacctctgaagatagtaacctgctgccaagcctgcttgcccagctccgataaccaatacatcgtacatatgtatcatccccaatatcgttttatccgttaatatatgagcacttgttcatatgtttattttacttaacaactctctgtttagcaatagaagaaaacagcagtaacttttttgaaaaaatcaacattaaaaagactccctgacgggagcctttactcatttcagcgtaggatacatgtaacgtaactttgatgctaagtatgatatgttctttcgttcgttagttattacctggtgtatcgatcaatgtcatcgatcgcagattggtgctctcttctatggtaatcttcatgctgacgaacgtcgttctttaactttgctaagaatccccatcccataaaggcaagtaaaagcacggtaatcagtgcataagcaaagctatatagattcataaaaaagttgataaatattgcagcgagcatcaagcccagaatcaacaatgtccactttgtaccctttctcaaatcatttcctcctcaagtcgttactgattaagctctctatgtatcacagtacatacgaaaccataggaacgaggtttcaatcacaaggcttcaaatctgcatttagagcgaattaccgaatctttaattaacatcagttcccagagaaacatctaatgtgccagacatcccttgcgcagaagaggtacttacataatacaaacccgtcgacaacgctttgtcactataatatgtatgctcttttccatctgctggaacacttccagacgttattgcggttccactagtagatcctttattgatcgtaaatgtgaagtgtttcgaacccgtgtttttaaaactcactttcacataactaaatcctcccggaatatcaaaccgatgcgtatttgtagtacctgcgaaatcttcattattaattactgttaatgtagttgatggagtatttctaggttcgtttgctaaaacaaattttcgttcagcattggaagtgaaattataaattaagatgataacagcagtagacagcaaacctgccactatcatttttctaatatatttaatgatatatgacctccatatctcttgatactactttgattataaaatactcaataatacaaaaaccactccttaataatttctaagaagtggttcttgtattcatttataatttgtaacagtgactgcttcacaaattcttgtcacatcgtaacgagaattcactctgccaggcacatgatgctttaaaggtttttacacctttattacatcatgccgcccattccacccataccgcccatgtcaggcattccgccaccagcacctgcaggttctggtttgtcagcgataactgcttcagtagtcaggaacattgctgctacggaagcagcgttttgcaatgcataacgagttactttcgcagggtcaacgataccagcttcgatcatgttaacccactcgccagttgcagcgttgaagccgatgcctgtttgttcttttttcagacgttccacgattacggaaccttcttcgccagcgttagctgcgattgtgcggattggtgcttccagagcacgcaggacgatgtttacgcctgtttgctcgtcaccggacagagctacagccgcaaccgcgctatatacgttcatgagcgctgtaccaccaccggatacgataccttcttcaaccgcagcgcgagttgcgttcagggcatcttcgatgcgaagtttgcgttctttcaattctgtttcagtagccgcaccaactttgattactgctacaccgccggacaatttagccagacgctcttgcagtttctctttgtcgaactcggaagttgtttcttccagttgtgtacggatttggctaacacgtgcatcgatatcggatttgttaccagcaccgtcaacgatgattgtgttttcttttgttacgcggatttgacgagctgtacccagttgttccacaacagcggatttcaggtccagacccagttcttccgtgatcaattggccaccagtgagggcagcgatgtcttgcagcattgctttacgacggtcaccgaatcctggagctttaacagctacagcattgaatgtaccacgcaatttgttcacaaccagcatagccagtgcttcgccttcgatatcttcagcgatcaataccagcggtttgccttgttgaacgattttctcaagcaatggcaagatatcttgcgtgctggagatttttttgtcagtgatcaagatgtacggattgtccaaaacagcttccattttgtccgtatcagtgatcatgtaaggagagatgtatccacggtcgaattgcataccttcaaccacttcaagctctgtagcgaatcctttggattcttctactgtgattacgccatctttacctactttttccatagcttcagcgatcagttcgcctacttcttcgtcagctgcagagattgctgcaacttgtgcgatggattgtttggaatcgattggtttggagatggattgcaattcagcaaccgcagctttaaccgctttgtcgatccctttacggataccgattgggctagcgcctgcagttacgtttttcagaccttctgtgatcagcgcttgcgccaatacagttgctgttgtagtaccgtcaccggcaacatcgttcgttttcgttgctacttctttaaccagttgtgcacccatgttctcgaatgcatcttccagttcgatttctttagcaatggttacaccatcgttagtgatgagtgggcttccgaattttttctccagaaccacgttacggcctttaggaccgagtgttacttttactgcattagccaatgcatccacaccacgaagcatggagcgacgagcgtcttcactgaatttaatgtctttagccatgttaagaaaacctccctagtttttgttggaaaatggtcgtgctatatggttcggttatccgattaaatttgaattagtcgagaatcgcgtgaatatcgctctctttcataatcaaatattctttaccttcgaatttgatttctgtaccggcatatttggagaaaataacgcgatctccttctttcacttccagagctacacgtacgccgtctttcaatactccagcaccaactgcaatgattctaccctcttgcggtttttctttggcggagtccgggagtacgatcccgaaagaagttgtttgctcttgctccagtggttctaccaatacgcgttcacctaaaggtctgatcatgaaaaatagcctccttttgaaattatataacgttacattgtaggttgtagccatatgtattagcactcgacagtgttcagtgctaacaaccaactttatgatactcaacttgaagcatgatttcaagtccttttgacgaattcctgcgagaatttacgttgaatttacacgaacataaccaaattacacccgctgcgcctggttatatgttgcaattcactaatcttattctacgaaattgtttagcccttctgcaacgttagcggacagtccctttcccattgtatccattgttgaacataatatgcctgcttgtcctgtcgtgttggtcggcagtctacagaaatagcccggataagaacacaccgtcttctccgggcacattacagcttatcctcattcagcccacatgtttcttatcctcggcacgaacgtagcgggattcgatctcttcatcggctgcaagttgcttgcgatatacgattgcggataataacacactgatctcatataacaggagcaaaggaatcatcaccagcagatcagatataaagtctggaggtgtaataaccactgcaatgaagatcagaacaaaataagcaactctgcgcatcttgcgaagacgaattggattcagaatccgcagtcctgtcagaaacataataagtaaaggaagttcaaataacagagacacaggcagcacaatgccaaacaggaagctgaaatactgcttcatcccgtaggtctccacaagtcccatcttctccgttatcgctgttgtgaaggcgagtgccatcggaaaaataacataatacgagaaagccatacctgtcagaaataaaagaaacacatagggcacatacttcagcgttgcttttcgttcgcgcggctttagccctggactaacaaacttccagatctgatacaccgtaaacggcagcgtaataataagtgaaaacaaaccggcaatcttcatgtagatgccaatcccgtcccagaacgagaaggcatgtaacacaaaaccttttgccgactctgccttggtcagatattggtataccgggtccgccacaaaaaatcctgcaatcagtcccagcacaaaaatacttaatacgtagatcagccgcttccgcagctcactcagatgttccgtaatcgacatttcttccatttgctgcgtcatgcctgccccccattattgccagcttaaaatacaaaacccttccggcaggaagggatttctctttcattgccgtcaagattattccggcaggcgtttatcagcaggcttgtctgcaggtgtgctctcagccgccagcggttttgccttctcctgctctttgcgattggacgagtcatcctcagagataatctcgcgagcgccctctttgaattcacggaaggtacgcccaactgcacgtcccagttccggaagtttgttgggtccaaacaacaacaatgcaatcacggccagcaaaataaaacccgttggtccaatggaactaaacattgatattcctcctcgtctcaagcttcgaagatgcgcatactcggccagatgttcatagatgtctctgctgcgttcttaatttaagcccatcataccatagatgtaaccacttacataacccgcaaaattcacaaataagagatgtcactagaacaatctaacaacagtcatggcgaatcggatatcttgcccagagtccatgctcgattattgcttgaactgaccagtaaccatcagcagcgcttccggaagctgatccataatggcagccagatgttcgtgcacaccctttggcgtacctggcagattaacaatcagcgtgcgtccacgaatgccacataccccacggaacagcattgcagaacggtttttgctcattacactgtaccgcatggcctctgccatcccgggaacttcccgctcaattacacgccgggtcgcttccggagtaatatcacgaatggccagctccgtgccaccggtagtcagcaccagatcggcgtgaaaataatccgtcatctcaatcaaagccgcaataatctcatcgggttcatccggaacgatacggtactccacgatttgaccacccagctcttcttccaccagctcccgaatgacttgtgcactcgtatcctcacgttccccgcgggctcctttgtcactggctgtcaggattgctgttctccacaccataaagatcacccttctcctctatgaaaataaatattgcctatcggctgtaatcaccgtttttgccaccactcttggaattcagcatggttggaccgataatcatatctttttgcatggccttacacatgtcatagaccgtcagtgctgcagctgaggcagccgtgagcgcctccatctcaacacccgttttgccttcggttttgacagtaacttcaatgtgtaattcatccactccgttatcatgaaaacgaatatccacacccgtcagtgccagcggatggcacatcggaatccagtccgacgttttcttcgcgccttgaatcccggcaatctgagccacagccagaacatcacctttaccgatccggccctcccgaatcgcttccagtgtatctggattcatcgtcaccttggttacggccacagccgtacgtacggtaatttccttacccgaaatatcaaccatccgggcccgcccctgttcattaaaatgggtcagtttgccacccgaagactggccgttgttcacttctgaactcaatcacatcacaaccctttattcgatatgtaatataccttcggttgttatcaacagatcaatccgcagatcgagcaggtccatcgggatctcctcttgtagctgacccggcaataccatcgcagccatcaacggtttcttgcccgtcatcacacatgttgctgcaagcgtctcggcaaaacgatcataataaccgccaccataaccaatacgcccgccatgaagatcataaccaagccccggtaccaatacgagatcgatatccggccaatcttcagacgtcaggacttcacaggaatccttaggttcgggtatcccccatatgcctggctccagatcctgttctccggtcactcgccgtagctccattcggggtggattcgccaatacttttggtgcaagcatcacatctccatggttccagccctcttgaaacagaaaagctgtagatgcttcgcttccataggacaaataactgaatataacgagtggtctgttcacgaccttactcttggcctgtctaaggcgctccagctcccgcttcactccagcgttaatcttagtcattgcctgctgacgcatgcttgcatccatcaaatcacggctctgtctcagtctggatcgaagctgacttttcagttccgcatgatcctgcatatccttgaataacctcctgttgatagggaaggtagaaaaaagctctcattaaaaatgatttatatgttatgaccagttgtcatcttgttgaaatggttaaaatgattcattttctgcaaaatcctcatgtaataacatgccttctttcagtttatcattgattgatcaaaaagactacatgccccatgcgttcccaatcggtgcaattgctctgtatttcatgtaaactgggatatagttgtcatatcaagaactggacctatggaggaacttaattttatgctgctgcaagtatccggaattatcaaacgttttggtgtcgatccaatcctggacggcgtgaacttacaaatattagaacgcgagcgcatcggcctcgttggtgtaaacggtgcaggaaaatccactttgctcaaaattgtggcgggtgaaatgtcctatgacgggggacagatttttaaatccaaagaaacgacgctcggttacctggctcagaacagcgggctgcaatccgaccgcagcatctgggaagaaatgatgaacgttttcgctcacctgacacaggctgaagccgatttgcgtcagatggaacgcgacattgccgaccctgcccagatggaagacgagaaaaaatatgctgacctgctggaacgttatgcgaaacgctccgattggttcaaggaccatggcggttatgagatggaaacccgcattcgcagtgtattgcacgggatgggattcggcgaattttcgcctgacacccctattgctaccctgagcggcgggcagaaaacacgtcttgcgcttgctcgtattttgcttcaggcacccgatctgctcatgctggacgagcctaccaactatctcgatatcgccacccttacttggttggaagattatctaagaggttattcaggcgcactgctcgtggtatcccatgaccggtacttccttgatcgactcgtaacgaccatcgttgagatcgaacggcaccgctccaaaaaatatacgggcaattacagccgttatatggaactcaaagctgccgaatatgagactcagatgaagcaatatgagaaacaacagggcgaaatctccaagatggaagattttgttcagaaaaacatcgtacgtgcttcgacgaccaaacgggcgcaaagccgccgcaaagcactcgacaaaatggagcggctcgataaaccgatgggagatctgaaaaaagcccatttctccttcgaaaccgccgttatgtccggcaaggaagtgcttcgagtggatcagctgtctgtcgcttatgacgaggcttctccattgttccgcaacgtatccttcgatctgcggcgcggggaaacggttgctctgattggtccaaacggtattggtaaatccaccatgctgaagtgcctcaccggaagtttgcgtccggtaaccggggatatccaatggggaacaaaagtgcagattggctattatgatcaggagcagactgggctcaatccgtccaatacggttctggaagaactgtggagtgcctatcccgggatggaagaagcacgcattcggaccgtactggggaactttttgttcagcggtgacgatgtgctcaagaagatctcctccctcagcggcggtgagaaagcacgtgtctctctctccaagctgatgctgaaggaagcgaatatgctcattctggatgagcctacgaaccatctcgacctgtttgccaaagaagtgctggaagcggcgttaatggattatgaaggcactctgctgttcatctcccatgaccggtacttcctcaacaaaatggctgagcgcattgtcgagcttcatccaggcggcacggaacactatctcggtaattatgatgattatgtggagaagaaacaggagcttgaggacatcgcacgtgaagcagctgaggcacgtcaggcttcagccaagaactcgtccaaatccgatctgaacacagccacaaccgaaaaatccggagcggcttcattcgaagcggaaaaacaggcgaaacgtgaagaacgtaaccggcaacgcaagcaggaagctctggaacaacagattgcggagttggaaacgaagattacagatcttgaggcacagatggctctgcctgaaatctatcaggattatatgaagctgcaagaactccagcaacaatcggaggaacacaaagcagaactcaccaaggcatacgaggactgggaagaactagctatggaatagtacgaatagtacagactcagaccatggcttgatcactccaatacaagtatagttgtaccaccggctgattccttattgggatcagctttttgtttgttgaggacgagtattgaagccatgcaccttatgttctgtatgttccttgagattgaactctaacctacgaaggttaggaagctgttttggcttttgtcaaatttactcgaatgaagagaaatatttttatcccccttttcctcacacttatccacaagaaagcaagatagcaagcacattaataagcttaattatacagcggtagaatagccttttacacacaaaaaccatatttatccaccaagttatccactttatccacaactttgtggatagtaaggagtcattctatcccctaaacccttttcctttcgaaaactatactggtttgactttgcggtagttacccacaaattacactggatatgtggataactatagtcacaccttgacaaatgcattctcctgctactcaatgcacctccataataagacaaaagcagacctttgttgttcaaggcctgcccgtcatttatttactatatgccatgcatatttacatcgaattgcaattgctactattgtcgctgtagatgcgatctggcaaagatgttttacgcatgtgcttcttgttcatgatgttcggaagattccgccttcagcccagcagcattacaagccgctacataagcaagaccggcagccatgacgatatcattatgtgttgccgtcccccggaactcacgccctgcacgctccacggtaactacagcttctgcacttgcaccttctcccccactcaatgcatgcatctccatatcaacaaatgcaatatcatcggaaatgctctgaccaatcgcacgaatggtcgcatccacgggtccaccgccaacagcggagtaagattgttctccagcgcttgtgcgaatacgtacagcggccattcgatccgtcatgctgcccgccgtcacctgcaattcaaccagttcatagtcctgtgcaggaatattcatggtctggctaaccatctgcaataactggtcgtcactgaccactttttgctggtctgcggtttctttgaacacctcatacaattgctccatctgttgctcatccggctcaaaaccatatttgcgaacccgatccttcagggcgtgacgaccggagtgtttgcccaaaataatcatgctgcgcggaatacccagcgcttccgggtccataatctcgtaggtgttccgattcttcagcagaccatcctgatggatgccagattcatgctggaacgcattacgtcccaccactggtttgttgtacgcaatcgggaagtgcatcgcccggctaatctgacgtgaagtctcatacagctgattcagcttaatgttcgtcgttacaccaattgcgtctccccgagtctccagcgccataatcagctcttccagtgcacagttccccgtccgttctccgataccattgatggtcacttcaatctgggtagctccattggcaatcgcagccaagctattggctacggccaggcccagatcattgtgacagtgggcactatagcgaacctgatcgccacctcttgcaccctcacgtacccggcggaacatctcgccatactcatgtggcagagcataaccaacggtatccggcagattgataatggtggcccctgcttcaatggcgacttcaaccatttcaatcagatcatccatcttggtgcgagcagcgtccatggctgtgaactctacgatgtccgtgaactgtcgtgcataagacaccatctcacgggccgtagccactacttcactacgtggacgacgcagctgatgctcaatatgaatatccgaagaagagataaacaggtgaattcggcgccgtgctgcatccgctgttgcttgaactgcagcatcgatatcccctttgaccgcccgcgcgaatccacagatctccacgttctgcaactgtctcgaaatcgcctgaaccgccgcgaactcacctggactggagatcgggaatccaggctcaatgacgtcgatacccagagaagccagttggtgtgccagttcaatcttttgctcgggttgcagacttgctcctggtgcctgttctccatcgcgcagcgttgtatcaaaaatctcaatcatgcgtttgttattagttgttgtcatgtccatcaacctccatcaaatttttataaatattttcgttacgatccatgagccacagaacacccgctaatcgccgtcactgttgttatatattttgtttgtaaacgcgtatgtcgtttgtagcttagtccttggtgatcactaatgcctgttgaatatttagtgtctatacttgatgttacatgttcattgctcgttcgatgcatatcctgcttaccctcatgacagggtgtacgtcgacttacaccctgaccttctgacttttcaatctccatatggttcattcccatgcccaccctgctgccggcagcaaacacaaataacccgccatctcatataagagacggcgggttattatcccctccgcggtaccactcttgcttgatgggccaggcttgcgccagactccatccacctcgtcgtctccgagatccaatggattgtgcatgtgcacacgacaccactggaattcggagaaacaccctataacgggggttaaccgttgctgtgtaacacatgttgttgtccattaggacaactgggcgattaatatcatccccacgcttccacagctccgttcccgggcgagattcgaatgattccagccactgcgtcgcaccaccccgcagctctctgagcgctttatcattctactgctcccgttcatcacatttatcatatgacttaacttcattcagccttattttgaaaatcaaaaaagcctgccacctcatgcaataatgcaagagacgacaggctgttcaccttcgcggtaccactcttgttgacttccttcctgttcattcaagacaacccctgaatgctttcgcatatccggatcacttgaagcagcctgaaagccccctcagttatcgtcagttgatccttgtaataacggtcctaccgacaacggcccattcacggaggcaacccgtaaccatgtactttgggccataatcggccttcggattctcccggggagtcaccgtgttccatcgttccgcttccaggtgagtttcaggtttccttcgactgcgttgcaccataccgcagctctctaagaccgggattgaccttactattcctgttcatcgcgtttatcagttcaggaatctgaattcctgtttaaatttgtaactaaatatacattctttacatcccagctgtcaactcttaatctcaaactgccttactatacagattgaacggaccattcctccagagaaagtccaggatcagctttggcatcaaattcagcaatttctccccgctgccatttcagatacgcagccgctccaatcatggccgcattatctgtacaatattccattggcgggattaacagttcaagcccttccttcgtacatcgctcctgtaatgccgagcgtaacccccggttagctgcaacaccaccgcataataacagttgacgtgaaccatactcacgaactgctcttaccgctttctccaccagcacttctacgacagattcctggaaaccacgtgcaaccgcagacggctccaaggtttctccgcgcattttagcctgattgagcgcattcagtacagcagacttcaggccactgagactgaaatcatacgaacctgcttccagccatacccgtggtagtggcaccacgttctccgcttcagacgccatccggtccacatgcggacctcccggataaggacaacccagtgcacgtgctactttgtcatacgcctcacctacggcatcatcacgtgtacgaccaatcagtttgaacttgccctcggattccatatgcacgagttctgtatgtccaccagatacgaccagtgccatcgctggatattgcagttcatgagtaagtcggttggcatagatatgccccgcaatatgatgtgtgccaatcagcggtttgcccagtgccatcgccagcgttttggccgcaacgatgcctaccagcaatgccccaaccagtcccgggccttgcgtcacagcaatcgcactcagatcacgcggacgaatgccggactgctcgatcgcctgttccagcatcaacgtaatgacttcaacgtgtttgcgtgaagccacttcaggtacaacgccgccgaatgccttgtgcgtctcgatctgacttgagatcagattggacagcacttcccgtccgtccttaactacagctaccgatgtctcatcacagcttgtctccaccgccaaaatgtaggatggtgcagaatttattttttcattaagttcgttcatgaatccagtacgcttccttcctcttcgccgctccggcctgtagacggcaagttcgcccacataatcatcgcatcttccccattatcggagtaataccctttacgaagacctgccgattcaaacccttttttctgatataaacgctgagctatgctgttcgaaactctgacctccagcgtcattcgttccatcccgagataagccgctgtactcattaattcatccagtaacttttcaccaagcttgcgtccacgatacgcgcctctgactgcaatattggtaatatgggcttcatccataatcgtccacatcccggcataaccaatggctttgccttccaattccatcaccatatatttagcaaaatgattgtgtgtcaattcattttgaaatgcttcttccgtccagggcagggtaaaggcctcatgttcaatctccatcacatcgggaatatccgcgagtgtcatgaacctgaactgaagcgttgcttcctgcttattattcgccacgttgtccatctgctttcccctcccccttcagcttttgcgcagaagattggcttccgcttcagacagctgggtgtagtttggcaccagcgcatgcacgtcatcacgctgacctgcaagcagcgcggcggcgccaaggcgccccacccagcggccttccagctcataaggtacgagctggagcgccgttcctgcggggcagcgaagctccgccgctgccgcagcatgagggcccgtctcgccgacgatccagacggctgcgggccgctcttccggcgccgcctccgccatgcgggcggcgagggcttccagccatccgtccatcttgcggatggcatcaggcgccagacgccggggcgcatcgctcccggcggaggcaaacagcgcggtgcacgcttgaccgcgccgtgcatccacaagcggaacgatccagtggacaggggcagcacttgtgctgccctggtccgcggatggcgttccgccagcccctgctgcggcatcctctgccgcagcttctgccttggcggcaaggccgctgtgccagccgccccaggcgatggcctgaaggctggacaccccggctacggggatgtcccatgcccaggccagtgtcttcgccgcggtcaccgcaatgcggatgcccgtgtacgagcctgggccaacgccaacggcaatgccgtccagttggccaggctgtgtgttgctggcggccagcagctgctccatcaccggtacaacatgtaccgaatggttgcgctcagcccgttcattgcgctcttccagtagcgcatgaccttccatcatcgccgctgccatcactgcggtggatgtatccaacgccaaaaaccgctgacgcggctctttttgtaaatcttccatcatcatttgactccattctgtctgaactgtcggcacatggctgcataagtctcgccgtacccatccagtgtaatcgttcgatcctccaggcccgttgtttcaatctgcacatgcaagtgctcttgcggcagcaattcgggaatgatacttgaccactccaccagactgactccggctccataaaaatattcatcaagtccaagctcatccgcttcttccagcgaaatgcgatatacatccatgtgatataaaggcaaacgcccttcgtactccttgattaacgtgaatgtgggactgcttaccacatcacgcacacccaaatgccaggcaaatttctgtgaaaatgccgtttttcccgcgcccaaatcaccatccaaagcaatcaccataccttcgtttgcctgtctggcgagtgcggaagcaagtgcttctgtatctgcaatgccatgggattgatacacccactgctcgtgcgtctgattcaatattcgccccacctttggcggtccagccgcctgagttcactttgaaccttattatatcggtccctttcttcccccgcaacatccaaggaggcaagccgaaatataaacatgcatgattagacgtgtctcaaaactcccttccttcgaagttttcagacacccaccaggaaaaaccaaaaaccggcacctttcggtaccggccatgcaaggcatatatttcagcttttattcattctccaaatcctcaatcatgttacctctatctactcctccaaacgatccacacgtaccgtctgagtatttcctggtctgctgccaacctgaacggttgccataccgttggcttcatccacattctcgatccagactggatctccctccaatgtaacggcaatggtatccttcgaatcatatatcgctttggcgcgctttgcatccatcatcttattcatactccccttccggatcatcatgtgattctcgaaccatgctatctgttgtactttcaccaatatatccgttatcttccgtaacctgtcccccgcctaacccttcattcaccatccggtcaatgtcaagcatgaaggactcccgatcaaggggcaattcttcagaagtgaccgcttcccaattcacatctgttgctggtgtataaaattcttcagcgctttcggcttccccaagaggatacggagaaaatgcatgcttgtgtgcttcttcctcatcacgtctgttcttcaatattgcacctcccggcatatgccctgcgagaataactacctatcccatgcccatcttcccgtaggaattcaagcatgtttctgttatcatccccgagtctcgccgaaccatacgaattcgttcgtccattagacgattatcccttgcgccagatgcccatactattaaatataaatccgtgttcaaaaagtccggtttcagtaccgagaagatggaatttttgaacaacctctaaaaggtacctcaatgaaaggagccgatctatgcataccgtctggaaaggtgcaatcagttttggccttgtgcatgtccctgtcaaaatgttctcggctaccgaagacaaagacatctccatgcgatacatccataaagtctgcggcagcccgctcgcttatgttcgtcaatgtccatcctgtgaagtggacgtcaagtgggaagagattaccaaaggctatgaatatgaaaaaggaaagtttgtactcttcgagaaagatgaattggaagcgttaaatgattccaccagcaaaaccattaccatactggattttgtcgacttgactgagattgacccgatctattttcagaaaacatattacctatcgcccgatcaggctgggggaaatgcctaccaactgttgatgaacgcgatgcgggataccggcaaaattggcatcgccaaaatctccattcgctcgaagagcagtctggctgccatacgcgtgctggaagattgcctctccatggagacaattttctatccggacgagattcgtcctgtctcccaggtgcccaacttgccggaagtgcagaacgtgaatgaaaaggaacttacgatggcaaagttgctgattgatcaattgtccacgccttttgaacccggtaaatacaccgatgactatcgcagcaaactgctggatcttatccagcacaaagtggcaggcgaagaaattaagattgctccagccaaacctgaagccaatgtgatggatttgatggctgccttgcaggcaagcatcgaggccgtgaagcctattccggctgaccctggaacaacaacggccaagcctaagaaacgtgcaccgcgaaaaacgcctgctcaagcggttgccggaggtgaatccgatacacctgctgcaccaaccaaaagaaaaaaggccacacccaaaccaaaagtttgactgtcgcccaggcaagaccgattccgttatataactcatgtcatgatgtttactccgatccggcttcacagtcggatttttttgttttacagaactatcgaagcagttcttgtcaatacaactacagctataattgcaaaatacgattgacgaaagctgatttatattttatattaacttatgaaaagtaacttatttatgaatatacagtcaccctgtaattctgcttcaacagtatgcaattaaataatccgttttcaacgcatatacacaattaaacgagcacccatattatctattatcaggaggaaacaatcatgaatacaacatatcaaatccctgccacaacccatctgggtgaagtgagtctgcgaattatgaacctagaccgttcaattaagttctataccgaagtggttggattaaaattactggagcgtagtggcaaagtggccacgttgacagccgacggaaaacagtccctgctgcgattggaagagctcacggatggaattaccctgccggaacgctcacacgctggcttgtatcatttcgccatcctgctgcctgaccgcaagtccctgggtcttgctcttcgtaatctggctgcatccggtatcgatatcggccaaggcgatcacttggtcagcgaagccttctatatctccgatcccgatcagaacgggattgagatctacgctgaccgtgcacgtgatacctggaaacgggatagcgacaataactacgtgatggcaagtgatcctgttgatgtggaaagcctgtttgccatctcggagaatgaaccttggcaggggctgcctgctggcaccgttattggtcatgtacatttccacgtccgaagcctggaagaagcacgcaactattacaccggcatactcggttttgatatcgtgggtaacttcgccaacatgtcagcactctttgtatccgcaggtggctatcatcatcatctgggacttaatatctgggcgggagtgaacgcacctgttaatccagataacgctacaggaattgactacttcaccattgtgtacgccacacaggaacaattggatcaggcacttgaacaattgcgtcaatccggtgcagtcgttacccaagtggagggtacctggtttacggtagacccacaaaatattcgtatacgtctgacaactgcgaactgattttgtttaggcgttacaatatgcttgcttaacctcattttattaagcccgggtaactgatttctctacatcacagagagatcagttacccgggctttttgagttggcttttataaaactggcacaattggtgcattctaaccaatacatagacaagatatattaaggagatacctcatgatcgaaaagggacgtttgactgttagacagctcgcttcactcatgttcctgtgcaccattggggagcagattctggtcttcccttccatgatcacatcctacgctcatcaggatgcctggttatcagccttattgggagtcgcagggggcttgggaatactcttcattatgctagttgcctacaaactgcatccccggttgaatctgattcaaaatgctcttcgaacactgggaccctggatcgggaccttgtttggttctttttatctcttttatttcctgatcagtacctcaacgttcattagggagattggcgattttatgtctacccagatcttgccggaatctccattactgattctgcatttggtttttatgtgtgcgcttgtctgggggcttctgtcgggtctggagagcattggtaaaactgctgaggtctttcttcctctgatcgtgttgtttctgcttattctgacggtgtgtctaatcccccatgtacgtttggccaacatccaacctgtgctggcacaagggtttcttgatccattcaaaggttttgttgctgtactcacctatccctactgtgagctatgcatcttcatgatgctttttccctacactaaaaatgagccccatctggagaaggacattctgttagcagggatgattggcggattgttactcacactgacgctaagtatgtgtctgctcgttatgggaccatggatgacccagcatcactggttcgcttcattcaacctttcacagaagatcaatatcggaaactttatgcaacgcatcgaagctttcatagcatcggtctggattatcgctgttttcttcaaagccgctctgttcttttacggttttgtcctgggcgtcgctcacctgtttcgcttgtccagtaaccgttcgctgatcctgccgggtgccatgcttattctcgccatgtctattctaatctctccaaacgagaacttttatctcaaggtcgttattccctattggattgattgggatctgacctgtggtatagcacttccgttactgctcattctggtgcatcatatgaagtcccgcttcaaaaaatatagtaaaattccgaattaacctgagctaattggtgtacgagagaggagttccccatgttcaaaccgctgattccgttcgaacccatatccagagatactttgcccacagggccgcaatggattgcccagatcaagtgggatggagtccgtatgcttgcctatgaggacgggcaggagctgcgtctggtgaatcgcagattacatgatcgaaccgcacagtatcccgagctggtaacaccacgcaatctatgctcaggctcctcctatatcttggatggagaagttattgcgctggacccagacaccggaaaaccttcgttttatcatgttctgcggcgggatcggatgagcagacccgaaggtatcgcccaagccatacatcagattccggtcacatatatggtatttgatattctgttctatgaggggaaatgggtgacggatcagcctttgtcagatcgacagcgcctgttgcacgaggtccttaacaccgctccccatgttcaggaggtcaccaatacacttgatgccgcttccctgcttacggtcatgagacaacatcagatggaaggcattgtctgcaaagatctcaccagcagttatggcatacagggcaaggaccagcgctggcagaaggtcaaaatcatgcatgacgtatatgccatgatcgggggagtcacgtaccggagcggtattgtgaatgccgtcgcggtcggtgtatatgatgggcctgattttgtctatattggtcatgtcgggactggcaaatttaactccaatacgtggcgggaactcacacatcaagtcgagcctctgatcaggcaggacagaccgttccataatgtacccgagcgcagtgcagagaccacctgggtggaaccgcgaataggagtcaaagtgcaatatatggagctgactcatcataacactctacgccatcccagtattcaaaccttcgcggatgtaacccgcgaggattgcctggcgaaccagcttcttccatgatgaagagttcgctgcactcgtgtttcggcccatgtttcaataattcattaagcatataggaggtattccatatggcccccaagatccagggaaccatcataatagaaggcacagagctgacggtcaccaacccggacaagctcttatggccggaagcgggtgttaccaaagccatctatctgcaaaagctggccgctctggctccttatctgctcacgtatacgagcaatcgacttctcaccacgataaggtatccccacggggctggaggaacatttttctatcaaaagaatgcccctgagcctgtaccagattatgtgcgcaccgaagttcacgacggcatccgctatgtggtcatgaatggacttcccgaattgttatggcttggtaatctggctgcacttgaatttcatccttctctgcatactgtgggaagccatctgcccagtgaatggatgattgatctggacccctctcaggaacatgaaccccggatcatgcaagctgcactcatcgttggcgaaaccctgacttcccttggtctgaggtccattcccaaaacttcgggcgcaacaggagttcaaatcatcgttcccattgtgcagggagtaacctttgatgaattgagagaggttggttattttgtaggcaaatatgtcactcagaagcacccggatctgttcacactggaacgactcaaaaaggaccgtggagaccgcatttattttgactatctccagcattatggaggcaagacccttgccgctccctatacaccacgtgccaaatccggcgccactgtctctacaccccttacttgggatgaggttagaagcaacgtctccatccaggattaccatctgatgaacattattgaacgcttgaaccaaaccggtgatttaatcgcagctgttgaaccccaaccggtagagctcattctcaaacatttgaagaaaaaatagccgactccctcatcacaagggtgtcggctattatcattcatgtatatatcaatcgctaatggataccttttttcttgaaacgtccgcccttcacgtcatgaatgttaccgatagccacaaaggcttgcgggtcccaatcttcaacgatggtcttcagcttcgcttcttctaaacgggtaatcacgacaaaaatgatctttttctcgtccccgctgaatccgccctctccatccaggaaagttacaccacgaccaagacggtctgtcagggctgaaccgatatcacgatatttctcactaatgatccataccgatttggactggtcaagtccttcattcacaatatcaatcatcttcatcgcaatataatatgcaatcatggaatacagggcattcggccagccgaatacaaatcctgcacctgcgaaaataaacacgttaatgaacaatacgatctgtcctacagacaaaggtgacttctcactaagcaagatcgccacaatctccgtaccatccagtgaaccgccagaccgaatgacaagtccaacacccacacccaggatcaatccgccaaatacagctccgagcaaaggctcccctggtgttaatgcaggcacatggtgcaataatgatgtcccgatggacatgaccacgatccccagcagcgtggataacgcaaatgttttaccaatctgcttgtaacccagaatcaggaaaggcaagttaagcaaggtcaggaacactccgagtggcagatgtgtaagttctgacaccataattgaaatccccgtaatcccaccatcaataacaccattcggtacgagaaacacttcaagcgatacagccattagtgcagcaccgatcagaatcatcacaatacgttgcagcagctttaatgtaaacaccgagcttttgaccccgcggtcagcttgcttggctgttagttctttcaccgttacattggacatggtatcccccccgttaaatcagtgtgtgaatccattttataaatcatttaaatactcagggtgaatctacatatggagaacagcaaactgcgttctatatgtaccctggctatacagcgcaagcatctaaaggcgatataaaatggattcaaaatgttattcatcccggtttgcactttcaaaagagagcaaaagggagcctgttttcccgcagactcccctccttcgccaagacatgatttatatatctattatatcataaaagatcaaatttgcgcaaaatacttagcaaaaagaagataaattcacaaaaagtgaacttatcttcagaaatctgccctaaatcggctaaagaagcggtgaaagcatccgagaaagcatttctgcgcctttttgccgtcgtgaacgcttctgaaatacctccccatcgatctgactgcattccccgagatcacgttcaaaatcagtgatcaaacgacgaatcggagaggactcgaacaggacagccgttaactcaaaattgcaaaaaaaactgcgcatatccatattggccgtgcctaccgttgcaagcaactcatccacaatcatcactttggcatgtacaaaacctttgcgatattggaagaactcaacacctgctcgcagaagttcctctacatatgaaagggatgccaaatgaacaagctttgaatcggattgatacggaatgataattttcacatcaacgccactgacagcagctgttttgagtgcctcatacagggcaggatcaggaataaaataaggtgtggtaatgtaaattcggtcacaggctaccgaaatcgccccaaaacacatttcctgaatggcatcccagtcctgatccggcccactggccagaatctgaattcgttcttccccgctacagatatggggtggaaacaattccgcaagctggggttcggtaattcgctcaccggaagccaatttccagtcgttcaggaacgtactttgcaggaagtacacggcatctccctcgatctgcacatgtgtatcccgccagaaacccacctctggatattgtccaaggtaatcatcgcctacattaatgccacccacgaagccaacctgtccatccacaacaacaattttacggtgattccggtagttgactcttcggtcaatcgttgcaatcagtggcggtagaaaataatgaaattccacacctgcatcctgcagtttgcgaataaaactccagctcatcttgtgactgccgagaccgtcacaaataaaccgaaccttcacgccctcctgtgccttgcgaatcatgacatcctgaaacttcgtactgatcacatcatcacggaaaatgtaaaattccacatgcagatggtgctttgctttttccatttccctcagcattgcggcaaacgcctcttcaccatttgtgagtaccgtactgtggttacaacctgtaatcgggctctccgacagatgggataataggttaaacaatcgatgctggtggctgaaacgatcgccaggcatctgttcgacatctccaatgatgtgggcttgttcccagatcgtttccttcatttcacggaagatgcgcgatccacccttgcggagtttttttcgtttgttataatcctgcgccacgaaatagtacaccacaaaaccgatcaaaggcacgcagaacaaaataaacagccaagccacagctttagccggattacgaaattccagcaaaagaattgtggctgcctggaaaataaatacgagtaatataatgaccagccagaacattcggcttcctcctcaagtggcaagcttcatggccttgcctttctctcacctacacatctttgacgattatgtatacagctaatcatagatacccaatgtaccccctattcgtaacgtttgcttagataaaactttacataagcagacggaatacttgattctggaaattcaaatttctacttcgttcattgtatattctgactgtgttaccttctacatatcagtttaatgatggagcagattcgcattgtgacgccaatctgctcatttcaccttccagactcttcctcatttctttgtctggaggtggtcttcttacgtaaaattagatataataatcgttaaaaacttattacctaaaggagaagagcagtgaatggaaagtgagaggtatgcgttaaatttagtattggttgcttttttgataggactttcggcgttttttgtcgcagtggaattcgctctggtacgggttcgtccgagccggatcgatcaaatgattgcagaaggaaacaagcgtgcgctggctgttaaacaagccgttgccaatctggacggatatttgtctgcctgccagcttggaatcacgatcacatctctgggactgggctggctgggtgaaccaacggtagagaagattctccaccctgtgttcgaaagcttgcaaattcctgaggcggtttcttcattcttatcgtttgtaatcgcgtttgcttccatcacgtatctgcatgttgtggttggtgaactcgctccaaaaacgattgcaatccggaaagccgagactgttgcactgctgacgtctacacctatcatctggtttaaccgaattatgtatccttttatctggctgttaaacggctcagcgaaccaactggtgaaactgttcggaatcaaacctgcttctgaacatgaagatgcacactccgaagaagagttgcagatcatcattaatgaaagctttgaaagtggtaaaatcaaccaagccgagttcggttacgtaagccggatctttgcttttgatgagatgttagccaaagaaatcatggtaccccggaccgatatggtctgcctttatgtgaatagaacaaacgaggaaaacctggagatcatccgtgaagaacaatatacacgttttccagtagtgaatgagagtaaagacgatatcatcggtatcattaatacgaaacaattcttcctggaactttacggaaacgatgaacctgttgatctatcctccctgattcagcctgtatcggctgttcacgaaacaactcctgtgaaggacttgctcaagaaaatgcagaaggatggcgtacatatcgccgtacttgtcgacgaatatggaggaacttccggaattgtaaccatcgaggatgtgcttgagcagattgttggtgagattcgcgacgagttcgacgcagacgaagtggaagatattcaagtcatcaatgagaactatgtcattatggatggcaaggtttccttatcgaaggtgaacgacatgtttatgtccagcctggatgcagatgagtgggacaccattggtggatggctctacagccatcgtcccgagatgaacgaacaggaagaatatgagttcgagaatctaatctttgttttgctggaaaaagacaaaaatcggttctacaaagtggccgttgttcccaaggaaccactgaccatgtctgattataccgatgaagacgagaaagagtccaattggtctaaataaagcaaatttataaataagaagaggagcacttgcctatttgggtaagtgctcctcttcttattatatctcgccccatgtgtcacttctccaagttatcattcaacccaagaatggaactcccgtttttagtttgattttaatacccacttcacaatatcatcgataatggctttggagacattagatggctcagcgtactcttgaccgatcgaaagtccatcatagctggataaaagatgatttacctttggatagctattgtacgttacattggaatgaccttggagagacgatttccaggtttggaattgattcatagacacttgcacatcgttttcgccttgtataacaaacataggtgtattttgtgttttagccagttccgcaggcacataatctctctgctcaaaccaccaataagcaggttgaagtggaaacgcctcaggaagatgatctacagaatattttggatctttaaccatcgcagccacatttttataaaaatcagcttgcccttgaatgacatccgtgtctaaaccaagctgcttcatccgctctaccaattcgtcctgctgctcggtaagcacatccgcaaagctactacttggtgcagcaagtagtatacttcctgcaatatcatgttgtttatcctcagcaatgattaatggcattgcaaacccgccttgactatgtccagctacaaaaatcgctgtagaatcaatatgtgcattctttttaagcaattccactgcatcgtttacctgatctacgctctcttgttttaatgtgaatttaggctgtgaagccaccttataggtatgctcatacgtgaccttatcgtatcttaatacagcaactccttgtgaagctaaacctaccgcaagatcgcgaaacggctttgcaccaccaatggcagcatcttgattgctaggcccagatccgtgtaccagaatgacaaccgggaaaggtccctctcccttgggcaaagttaatgtccctggcaaagctaaatcaccctgaccaaccataatgtcttgttctgtataggcagatgggtcgtcgtagcttggtttttgatacacatcgggagtagcggcggcaatatgcaaatcatctacaagtccgttatgattcattctgaccgtaatatttatacgagttagctctgttttgaacgtataggtaacattgcgatgcactgtattattttctacatgcttagctatagcttcacttgtaattttgccattttgtccttctaaagctccccacagctgactcaacaacgtgggtgataacactccactcacagaggtatgaacatacttggcagcctccttgccatcgccctcactaataagggaaatgaatatatcctcaggtgctgccttcagcgtctcggaaagaaatgccccatccatataggtagttcctttcgttaactgaacaggattgtctaaggatatggcttgcccattcaccatcgcctgtttctctcctaccttaactacaatcgtaagctcactttttcgtattgtgatttctcctgtcttttgttgccaagatacctctgccccattcttttctgcaatctcacgaataggaacaagattttcactaccagcggatttttcagcagcttctgagatggatgttaccggaaggatgagacctacgaaagtaagagaaagtaatagctttttccaattgttcattgtaataactcctcctaattaatttcatctatcatatgcatagcattatgagcatttattggctcaggactatgcttataacaacaatagcaatgatgaataacaacaggacccaagatagtggacgagcgaagttaattgtccagcctattccataacgcttttctatggttaaagaaggatcattggcattgaagtaaataaacccaagcttccaataatcatcgtcattcacaggctgctccttagatcgttcgtggtcctcttgttgattacgaattttgccaccgccttgtctgcctgtgagagacagccatacaacacctaacacgatcaccacaggagtgatgaagctaatagctgttaacaagaccagattagggacgaacatattgatctgaataaaggcaaataagatggtaagaagtaatcctgttacaagcgtaaatagggaccatttacggcggaattgaatattttcagtagcaaattggcccggattagacgtagtaagctgttgtttgcttgatttaatactccagttaaccaacatcataagtgcaatgattcctagctgtacaagattaatagccagtaccgagaggtaagttttaggcacactggaagtgacatggccttgaagatcatattttattggaatgacgttaggtagtgccttataattcaggatcgaaatgatcgcaatggcaacaataatagcaatgtgaatgagaaaccaatagttggaataggtgagtttattttggcggaaggtggtatcgattttaactcttagaggtgcttctacagttgtaagtgttccttttatctttttcatcttgaaatgaaataagatgtgtagcgctgtccagtacacaataaatatcattgtgctaacaccggtaatcattgcggtagcatcttcattagcagatcggagaaaatacagacagacaagtataatcatcccgtttccgatcagacttactgtagcaaacgtacttcttagcttacgtaagatgggtgtgtagtaattatattgacttaccgtaaccccaaagctaatggtttcccttgtcagatatggtgtaaaagatagaagtaaggctaatggagcaaagattaaaatgataggtaatatactaaatagctgcatacataacacactcccttgattctttactctttgttgtgacccatcttcacatcatcatacatttggtctaacaccgcagataattcttctttggtcattcctcgacagatcgcttccgcaataatcggtcttaattctctttgctgctttttcaaaaaatcatccgttaaaccaggcattccatcagggttcactacaactcccttttgtctatgaactagaatgtatccatcttgcttgagtagtgtataagccttattgacggtgtgaaggttaacaccgatatctgcggccaaattccgaaccgaaggtaacgcctcacctagctgtaactcaccaccagcaatgccttcaataatttgataaacaagttgcgaatagatgggaagttcggattgcatatccagttgaataatcaagggttcaccttcttttgttatctgttatatatcaagtataacagatataacatgagtgaacaatatgtatgaaaaaaagccgcatatcaatggcgaaacttacctgacccttcaccattgatatgcggcttatcctgttgagcttatcgatgtgattcaagaacaaacattagtagtggcacatgacagcgttgtatttcaaattccatttaagtttcagtcttatcttcgacaatccgataatggattttgcgaactataattttcagaatcatatataggggaatcacgataatcatacccaagatatttcccaggtcagcacccacgagcaaaaggataacggtagtcagtggatgaatatcgagctgtttgccatagacataaggtgagatcaggttatcctgaatttgctgtgcgattacaatgatgaccagtgaccagatcgccatcgaaggtgattcgataaacgcaacaatgacaactggaatagctgccagcaaagcacccacataagggatgaagttcagaataatcgatacaaccgtcagcagcaatgcgtaaggcaaacctaagatgagaaaaccgatgtacatcaggatccccaaggctacattaacaataacccggccaacaatatagttgcttagtgcttcatcgatctcatggacggtttcttccccatccttccgataatgtcttggcaacaataaggtcagattcgttccaaacttgctgccttccttgagcatgtaatacaacatgatcgggaacgttgccagaataataaccagattggataccacggagaataacccggagacataattggttacctgagtgatcccttggctcagaacatcggataatcgtgagaatagattggaatcatcaggcaggtatctggatacaacattgctcctttcaagtgcattcaactgatcgctgagtgaagtgaccaacgctggagcattctccacgaaattcatcaattgttcacgcagggaaggccatacgagcacactaaaacctgcaagtattagtgcaattacgacataaataattagaactgacaatgcacgtttgatcttatgcctttccatataatcgacgagcgggcgcagcagataatagaagaaaccagcaatcagcagcggaatgatgatgatgtgaatcagtgaggtcagggggctgaaaataaagttcactttttcccccagatacacgatgagaagcagcagaataatcgctgtgcatatgcgatagaacttgttatttatcaagaaacgtgatccctccatgcgctgctctgccaaagtgactgcggcgttcatatgtatatctagtcatttacttatgatactaagtacccttaaatgacagtcatgccacaggcgatgctgaatatacacttattttctttccaaaacaaacattggaacaaaaaaaagaagcaggcgttagcctgccacatctctcttgctgaatacaacccaggaaatcaccatgaaaataacgtaatacaccgccagaactgcaatggagaaacccagtgtcattcctgcacttggaccacccattagcgcaaaatccgccccggaggtcatgtatttgctaagatccatgttgttgaatagaacatacttggcccactcataacggaccggattgaatatgagtgagaagatactctgtgagaacataatgaacagagataatccaatcgcaagtgcacctgaacgaaatacggaggacaccataaaggcaatcgcaagggtaatgaacagatcaacatacaaatatccccataacgtcagagcattcgtagccggactattgcttcctcccggagcatcatgcgagaaaaggatataagacgttagcatggccatcgcgatgatcagcaatgtactgacaatactgaagccaacgacggtcagatatttggaagcaagaactttgcttcgtgaccatggacggatcagcaatagcttaatggttccccaggtaaattcgcccgcaaccgattccgctgcaatcacgacacagaagatcgtgttaaggaaaaatgtaatctggatggtcgttacagccgcttcccagtacaaaacttcattggaccccatgccttctcgcagtaacactggcattaatagcgagatcagcgccagaattgataacatgatccaggtacggggacgacggaaaattttcatattctcatttaatatcagattaccaaaactacccaatgcctccacccccagtgacttgcaagaattgttcttccagggtgtgagtcacgttacgaataccgtatacctgaaacccttcgctaaccagcttggcattgatatccggaatctgctcacgagacacccgcatcaccaggacattgccctgtacgacagcaccctgaatcagatccgcagcacgatctgcatcattcagctcaaaagcaacttcgattaatgcatccgaacctgcttcagcccgaaggtttcttacatcgatcaacttgccattctggatgatggcaaccgtatcacacatcagttccatctctgacagcagatgactggatacaaagaccgtaatgccttcctcttgggtgagctgacgcaaataatctctcagttcccttataccctgtgggtccaaaccattggtcggctcatccagtacaagcagcttcggtttatgtaatatcgcttgcgcgacacccagacgctggcgcatgcccagtgaataggttttgaccttatcgtgaatacgggctgtgagccccacacgctcgatcgtttccgcaatacgttccttcgtaactcccggcgacatgcgggcaaagtgaacgagattttggtacccggtcagaaacttgtacatttccggattttccacaatagctcctacctgggctaccgccttctcaaattcattctttacactgtgtcccgaaatgaaaatatcacctttactgatggacatcagtccaaccatcattcgaatcgtcgttgtttttcccgcgccattaggtcctaaaaaaccaaaaacctgccccggagaaatatccagagtcaggtcgctgaccaatgatcgggaggatatgatcttgctgacgccctgaatccggacgaccggctcctgctgcattcaatcccctccttcatggacgagcacatcattcatgcccgtttctcatatgaacatagtgtatcataatctttagtatattgtcccgcaaactgggatttcccctgacgtttcgcttcaactacacacgcttcacagcatccaagcggcatttcactccggtagaatccggtgcgaaatacgtgattgcctccattgccctcttccttcatttcgacagagcttctagtgaccgacacaatcatcccacaactgacacagtaaaagcggcccgtttcgatcaatgatattccttcccctcacaaggagcttagaagtccttgttatttgtcgttagacgctgaaaattgatacattttgtatctatctcgtaatttacttgacaccgggactaatgtcaaggctttaaagctataaaaacaagcaaaacacaaaaaaagctccaaaaatgcgacaaaagtctcgcatttttggagcctcatgttaggtaaatgatacaattcggttcaatgtatgggttaatactatttcctgatcagtcactattgtcgacctgcgaggtatcctcgtttttctgatttggataataccaaagtaaggtccactcatcgccatcctctaccagataacaggtctgcacaatatcgaattggccaaaggtacctgagtacttctgggtgacccggattctgtaggcttcagaaaatggcttaacgccatcgatcacggttacatcgaactcgcgctccggcttttccatctccagctcaaacgtttccacgccaaagtgctgcataaatatatgtgctctgttctgtacgtaagcactcttgggaaaccgctctttcatcaggggatgaaagagctcccatgaactgccgaagtcacccgtctgctcatatttgtaaaactcttcggcaacagcagcagcttcatccgatgtatctgcctgaaacagatacggaatggttctggcaatcaaccacagcaataatacaatgatcgtgatgaacccgatctttttgagcaaagcattccggtttcttcttcgcagcatgtccagtcctccttgtcctactccatacttatgatggatggcagacaagtagaagttgaacgatacatctaatttcctgggaaatcactcgctgtgaatggaagtacgctttccttttctgatccttcggatcatggactgaagtcctgcatatatggcaatcccacagcagccgccgagcaagtctactccaacatcacgtatcgagcttgtccggtccgggctgaactgctgaatatactcatcaatggaggctataacaaacaccacagccagagcagaaccgatactggtcacaaggggtgttcttctgtaccgcagcccgccgtacacaagcacggcgagcacagcgtatacaaataagtgcgcactcttgcgaaagacgaactctgcaaaatcatacggcctctgcttcagcgaatactcatactccccgtaagtgaattgcacatcaggaagtgtaaaaccgatgtgcaatttttgagaccatttatgaagccaaggctgaatgtcttgctgttgagaggattgcgtggacatggaccagataaccagaatccagatcacaatcaacagcagagcaatgagaaatccgtatgttcttcgtacatgcttttgtctcgtgcgcccggagccctcctccatcattttaatcttcaccactttcatatctctctcgttattctattgatccaacatacatgcctctgccatttgtacctacatatacctgaccatagatttgacggtctgccgccataatttgcggttcattgcccagcccgattccattacctaaaggacctatattgttccaggttacccccatatcatcggaacggaagaatccatgcacgttatttacggtgccatatacatagacagccggaaccaatctgccgggctgagctttaccaaaggcaaataatttggaattctgcacaccctggatcttggaaaatgtatttcccgaggtcgttgatgcatataatccatcggttcccagactcacccatacattattcgccacgccaggtgcagcctcgactttaatgaagcttgtattgatatccgtattaatcggaaggcgaaccgtattcgctttggaccagttggcacctgcatccgtagaccgatacagataaccagcagcatacatataaaatttatatccattgatgcgatccgcagccagtggatgattataggcaaagaccatattccccccgatggcctgaaaaggggcaccattcatattttgccatgttgcgccacgattcgtgcttctgaccggattaccggtctgggggtaataaacaattacattcggattgatggccgagtaggcgaccctccccagtttggagccagccggaacattcattggagttaccgtaactccgttattggaagagacaaataaacgtgtggtggtaccataccagtcactgcttcccagaaatatcatgtaattcggatttgcctcgtgatagtcaatactcacaatttctcgcatacctgagagcgggattttattaagaggaacatcggttacattttcatgtctaaatccgacttgatccgttaaaccactaaaaaatgaaacaccctgaggtggtgtggatgccgtgagtgcgacgacttcttcatgaccatcggtaatggcttcccaagtactcgctgtattaccagtcaatccagtggtaccattgatattttccgtcttgtacacgccaaaccagtctgtagcgtatacagtgcccggattatgcggatcaaacttgatactggatgtcgctgagaaaaacatgttgggtgtccaccatgacggtttagataccagcgtcttgctcactgttgtccaactctgtccgccattaatggaacgatacagtggcagattatccccgcctgttcgaacggcggccaggatgtgattatcattattgggatcaatcgtgattccataataagatgagtaactggagctgggtgttatatttgtccactgcacaccattgaacttgtagacgccctgattatccgtggtcacatacaacgtcccgttcttcgccacagtcatacgtgcaggatattcgggacttctcccggtaagttgccaagtggtctgtccattgcttcttggtgctttgctatacacaccaatgccgcgaacccccgcatacacaacttgaccttgcttcgtcacgggattcaatccataagctacactccgaattccctcaccggatagcccgctaggtacatcccataccttgctccacgtggctgcaccatcactggaagtgtacaatccatcatatcgtgtacccacatgcaggtaattggagttcgtgggattaaccgcgatgctctctcccatggctcgatggatatttccatttgattcattccgaagattaagtccggttcgaatccaggtctctcctcgatctgtagatttcagaatatcactcggccccacgttcccgtacttcccagcagcgatatacacgacattggggttttgctgatccagcgcaattccatccacgccgtacagattgctgtcctcatctccgaaatgatccagtagcgggacccaatcccctgaagctgcatccaaccgatatactcctccaacgtcagttcgagcgtaaaccagatcaggctcagtcggatgaataaccacgcctgtaacgtaccccccaccaccaataggtatattcttccattgatagttttgagctgattgaacataatttgtacttgccggtatcatgagcatatacattagtagcacaatcagggacaatttcattagcctggagatacgcatctggttcaccgccctatccgatcattttgaatgttcttcaatcatctgatgtatcctgtctcgttccgattgttccacgatatagtaatacactccgtctattttcttgcccgtgcctttaatctcaacggattcaatatgatccagtaccgaacgataattggagaacatctgcttcatctcatcaaaggtaacgtcggttctgacgtgagcactgacttcgtccagcaacgtctccagttgcaacacgttggatacctgaaccgtattcttcagcacttgtttgatgatctcccgctgacggtcattccgcccgagatctcccttcggatcatcataacgcatccgcgaaaatcccaaagcagcttcaccatccagatgaatatttccttgctcgaaccggtaaccctcatagtcaaatgcaaacgggttattcacattcactccacccaccatgtcgatgacttgtgcaaagccctccatattcactttcatgtagtaatgtatgggaacgttgagcaattgttccacggtctgcacagacatgttaacgcccccaaaagcataggcatggttgatcttatcctccgtgccgtgaccaacaatattcgttctggtatctcgggggatgttaaacataagtgcggatttttttacaggattaacacttaatacaatcatggtgtcggagcgcccccgatcattggaacgttcatccacacccagaatcaaagcattaaaaggttcttcattctccatgtccacagggaaatctcccccaccccgctggtcgacaatagatacctgcttgatgggttcccggggttcatacatttgatccgccgctgatttaacatgcgaatacagatacacagaatatccaatcatgacaactgcaacaagggaaatggcacctaatgttattttgatcccgcgtctcatgttatggcctccgttagatgactgccgtttttctaccatcgatattggttagacctggacgaccaacggagtagtattgaaaggacgtatctttaatctgatcttctccgtagatgtttcttccatcaatcaggatgggttgattcatatgcgctgccaaatcagtcagattaacctccatgaattctttccattccgtcagaacacagagtgcatcagcaccttccgccgctttcatggcgcgctcttcccacgtaatggatggggaatccacctctttgcggaagttctcggtagcgatggggtcatatgcccgaatcactgctccctgctcaagcaaacgctgaatgatctcaatcgccggagcatcacgaacgtcatcggtatctggtttgaaagcaagcccccagatggcaatttccttcccttcgagtgagcctagtgcatcttccagtttacgaatgacgttaaagcgttgatctttgttcacttccaccacggacttcagcagtttgaagtcataatccacattacctgcaatttgaatcagagcttgtgtatccttagggaaacaggaacctccgtaaccaatccctgccttgagaaaggaggcaccgattcgtctgtcatagcccatgccttcggcaacacggctgacatctgctcctactttttcacagatgttagagatttcgttgataaatgagatcttggttgccaggaaagcgttggatgcatatttaatcatttccgccgagcgaatatccgtaacaataatctgatcggttaatggctgatgtagctctttcaacgtggcgactgcccgctcactatgtgtcccaatgactatccggtcaggatagagcgtatcctggacagcggtaccttctcgcaggaactccggtaccgatgccatgtcgaatggatgattcgtcaaactgctgatccattcctgaatacgatcgttggttccgacaggaacagtgcttttagtcattattattttataattatccatataagaacctatttctcgcgcgacaagctcaataaagctcagatttgcttcgccattaggcagggatggcgtacccactgcgataatgatgatatccgaacgactgatagcatcctgaatattggtggtgaaggacagccttcctgctttcatattggcattcatgatatccttcagacccggttcatagatcggaacatgaccgtccattaacatattcactttttccacattgttgtcgacacagatcacgttatttcccagttccgaaaaacatacgcccgataccaaacccacataccctgtgccaatcaccgtaatattcattccataatctcccccatgttctaatgtgttggttacgcgtgcttcacatatgtctgaacaatgtcctgccattcggtagacactctaacgatatcttcctcaatcagctgactgccgatctgtacctcaatgatctccagttccgtaacggctctgacggaatgaagcatactccggtcaatgatcaccgtatctccctgcccgatcattcggctcttcccatccagaatcaattcccctgttcccgatacaaccgtccatacctcattgcgaagcaaatggtattgataactcaagtttttcccggcactgatgcagattcgtttggtgagaacctcgccgccagcttcgtttcttgtgtaatccagaacccggtagcaaccccacctacgctcctcatacatggggcgttgatcctcgttcttcaagatttccttgatccgtgggcttgcttctttgtcactgacgagaatgccatccggactcacggcgaccaccacatccgacaagcccaatatggcaaccggaatgttcaattcattgaccagatgagtattcagggaatctcccgtaatccacccttttcctacaaccgagcttcccatctcttccgtgagtgtgttccacgtgcctagatctttccagaaaccgttatacggaatagcgataatctgattggctctctcgacaacctggtaatcaaaactgatcttgttcaatcttccgtattgcttcagcatctcgtcatactggatcggcagttccatctcaatgagcagattaatcaaataaccaagcttaaaagcaaaaaccccgcaattccataatgcggcctgctcaatcatgaggaccgcatcggattcgcagggtttctcctggaacttcgctacattcacgtattcattgttattttcactggaagattgggattgcggaatgatgtatccgtacttctctgacgggtacgtcggcaccactcccatcaaggccagatcagcaccagacttatcaagcatctccggtaaggttgccagcacttcgaagaattctttttcaacaaagggatctacaggcaacactgcaatcgtctcattcagactcacactctctacggaatacagataggaggctgccagcgcaatcgcaggaaacgtatctctgcgctcaggctccacaaccagtctcacatcgtctcccagctgagaagtcagaatctccacctgtggcaaactggtcgcaataagtgcctctgatgcaagtccggcatgattcagctgtctccatacccgctgtaccatggattccggacttccctctggcccatgaagaactttaagaaattgcttggatctggaatcgttggataacggccagagacgcttgccagaaccaccggataacagaatacttctcatagggccgcaccatccgacagcacaaccgtacttgctcccttgccggtctcggttggcttgttatatgtgctggtctgattggactccagtctgcctgccggattgctcttggtccaagctgcataataattcgagttcttgccgtatgaattatccagtaggatgtttggttgatccaggagacaggccagaatatgtccatgcagacgggatgtcgtgatggttcggtattgattgaattccttaatggccgtatgtaccatccgatcagagtatttgtaccacaaccagcgggcgaaagagctgcctttccctgactttaaccgggacgtaatcatgcgaatgatcttccggtctacccggttgtacaatgtctcccagtctttaaacgtggccttgggtccactgacggattcgtaatgcacctgattctgagttttctcaatgtctttccggaagaaatataacatctctgcagtaggcttgctcttggacttaagaggccacaactgatgcgccatatccggagatagatacacattggtttgttgaaattctttactggctatatcataagataaggtatcccggacaaaaaagtgtacatccttatgacgattgaatacttgggctgtctttttcaattcaatatcactcttataaaacatcgtctgtggcagaatgacaatccggtgattcggatgctgggcaatcatgcgctctctcaatttctgatgggcagggtacagatcaccaaagttacctcccccgtgcaacacaatcgtgataccttccggtaccttgagggacaaagggcaatccagaatgctgtatctggcacgtacatgaatatcattgtcccggaagaaagcctcagtacctttcataatcaacaagtcgccaccattgctatgcaccgggtaatccaaataatagatttcggtacgcggtggaatgaccttcaaaatctgacgtaaatgtcccttcaactcttccattggatgaatattgttagtgcccagcatctccatctcctccttgggtgactcttcttctttttttatttaaccgttcatagagaaacgtcagatcttccttgtcatagaacatggcggcaaacttcaccttaaatacaatcttcatcgcagccacagtaaccaccattcgtacaatggacccgatcaataaggcaattgcaattccgttgagcccccacagcggggtgaatacaaagaacaaagccaccgtcaccgagagtgcaatgagctgtctgatcatcacaagtccaggccgaccaagtgcattaaatgcggatgccagaatccaggagccaccaccaataatgcattccacagccaaaatataaaacgctacgctcgcttccaaaaattcggagccaaacagaagacccatcaggtagttccccacaaacatagtgggtattacaatgatcatcatgaccatgagcgagatgcggaaagctctgccaactgttcgaataatctgctcttggggcaatccggtcacttttggaaaaacaacattgctaatcgccgtctgaaccgcattgtagattcgggataacgcaaatacgacggaatacagtccaaaatcacgcggggtgagcaaagccaaaataatgattttatcaaactgggtatacagcgttcctagtaattcaacgccatacaccttgctgccataaccaaaaagtttcttggccgaactctggtccacccgatccttgaaccatctcagtcttaattcattacggttcgcatagatagcccacgccaccactgagaagctggttacaaaatagatcgcagccgcaagctgaatgctcagcatgcccagaccccataacacaaaaagcccgcctacattaaacagggggatcattaaccggataccattatatacagcgaatttctcccgactctgcgagagcgctgatatgagattgatgacaataagtacaggaacggtagcaatcgtataccatctggatatctgcacgacctccggcggaaagctggagagccagaaaggtaatccaaaccaggccacaatgccaatgatgatgcacaccggaacttgaaaaagaaagcttaaccgaacatactgcgcactcttctcggttgcgctctgtttgatgttataaatgatagaagttggtagtccaaatccgaccaatccggttaagagcgccggccagaacaaaatggccgaaaacgcaccctttccctctaccccgaacatgcgtgacgtcaaaatggaagacaacatcgtcagtgtcatgaccagcagattggttccacttgtctgaaatatggcactcattaagccgtttcctctgaatactttgcgaagtgcaacttgcgccatagcgatcctcatcccttactgttttgacgaagcgacccaacaatcatgccgtttcggtaacatactttggcgagctgacgtgtgaaccgatctgcattataaatgtagatcagtgaggttgtgatcccctgtgcaagcttgatgccatgtttggccgtacgcacaacaccacgatcctgatcacgaatagcatcactcacaccctgccaatagattcggcgcagaaaccagttcttcgtcgttcgctctttggctactttatgttgtaccgcgccgtacggcgtgtaatataccttgaactttgtccgtattcttgcaattaactcactctcttcactggaaaggagattgttccccactcttccaagatcttcacggaagggagccagttgatcaaagacagataaacgaaaagccacatttgcaccaaatggaatataaggacttttcatttcagtgacttcatctgcaaaatccagaatggtgaatagcgacctgttctccggtggaatccacattggctcaggtacttcccagatcggatcaatcttgccaccaacacaaccgatattttcattcatctcaaacacactaacgatctggtgaatccagtccctgcaagcaaaggcatcatcgtcaaggaaaaggatatactcgccgcgcgcctcgtgaatggcccggttacgggcgacagacaagccttgcttttcttccaacacataacggatcgaatggttctcatgctgcaagatggtttgaagcacgacttcccgtgtattgtcttttgaattgttatcaatgagtatgatctcatagtcgctgcttgcgtaattctgttgtattgcacttcgtatggcctctaccgcatcctgtgcacggttatacgtacagatcgcgacggttaccttcatcatttcatccccatatttttcaattaggtccacccgttcatctgcactaactggagtacagggtaagtgtcctttgggcaattactggccaatccagccgctccaacgctttgacaaaaccactgccttcctgaaactccgattgttttaaccggatcatattcatcgctttaagcaatccatccggatcggaaggttcgtagagcacggcacaatcttcaggcagatattcctccaacaatccaatccgtggtgccaccaccggtttacagaaggtcaatgccagaattgcactgcctgaagtcgcaatttgcttgtatggaagaatgatcgaatcgactgcatcaaaataatccgaatattcatcatcttcgatgaaatgaaaatgagtatgaatatgtccactcttgagaaattcatctccaaggtcataatcctttacctttttgccggcaatcaacagatgggcttgttcggaatccagatccttgaatgcctccagcaaatcatccacacccttgtacggcgacacctggccgaagaacgcatacacataactatcctccgggatgccaaaccgggagcggatattcacgcctttaccctgatacactcccttgtaatgtccatgcggaataacctcgatccggctggaatcaatcccaaacgtcgaacagatctcagagatcaagggtttgcccatgacaatcagcttggagcaattttggaccagtatttttctcatccaataatcaaaccgcgtcttgccgctgttgtgtggccagatgttgtgcaccgtccagaacaatttggcccctcgcaagcgtgcaaaacaaatcatcaatacatacagaatggacttgatcactgttgtcagcacggaagaacctctgtaatagaagctgggccaatgaaaatgcagcacatcattttttttcagtttgagtagatctcttttggtaaactgtttcacttcccatcccttgttctcaatggaatcggataacagctcattgaatttattgttctcaatcatcttaggcagcatatacaccgtcggattttccatccaggcacctcttactttagtttcattcgcacaggttcctctgtatacgttccaactgcgcgtcttgcatgaaatctcattagaaatccttgcatcataattttggtattacgcttgagcagcacccaatctttccaccagggatacagcgacagtgcttttttcaaataaacattattgcgaagtgtatttctcgaccattcaagcattcgataatggtgtaactgacggcgcttctgttccttggacatgtcattgtagtatttcaaaataatcttgcgttggcccttgtacttggccgttgtagaggttgaaattcgtggaccactatggatgttgatatccaccagcggttctttcacattcacggcgatgtaacctcgtttcaatatacgcagataaaagtcataatcctgagcggatgtcagattttcatcaaatcgaacttcacgggccagtgaggtaagtaccatgattttggacgtttccccaatccagttgaatgtaagcagatcctcataccgaataacatcgcgaggttccaccgacaatttccgtttgaccacctgatgctgctcattcgtgtatgcgagatacttgctgcaaaaggtgaatgattcctgtgtacgttccagcacttccgcctgggtttttattttgtcaggcatccattcatcatcatcatccaggaaggcaatgtacttgccattggcttgggatatccctacattccgtgcatggttggctcctttgggatatggaacccggatgtacctaatccgtgaatcttcccgggtccaagcctgacagatctctggggtctgatcttctgaaccatcatccacaatgaaaatttccagatacggatgtgtttgctcccgtacacttctcaacgcatttttcaataactcggcccggttatgggtcgtaatgatgcaagataccaaggggttcatttcatcaccttttcctgttcactaggataccttcacttgaagtgcatcatatattcctgataatctgcccacgagaagattcatatcgaacttatccgatataatctctctgttatgtgaacccattcttgctctaacctcttcatccgtgatgagatattccagcgctgatgtcagcccgtgcacatctcccggctcgattaacagcccattatgaccggatgtaatcacttcggggatgcctccgacggtggtcgatataatgggcaagccacaattcattgcttcaagtatggccataggtaatccctcatgataagaaggcaggaccagtagatccgcttcccgcatcagtttttccttttgctctccgttaatccagccgagtacattgacacgattctctattccatattgttgcacgattgctttgacttcttcgacttcaccatcccctgccagattaaaggtggctgtaacgcctagcgccttcaattgctgaatggactgaagcagatcatagactccttttcgctcacccagtctgcccatgaacagagcattaacggctgtttgttgttctcttacaaacggttctttgacaaagaccccgttataaagaacctcaatcgctgtctccggcacaatcgtagcaaagtattctttccacgtctgggacaagacaatcaacttgtctgcctgattcagaatgtagtgacaatacttgcgctgcagagcaaaatgattgtagaaatcatcaaagctggccgcatgaatatgcagaataactgactttcgaaacaactttcgtgcggttagcagaaatatagacttccgataaaagctcccgttgtttgccatatgaatatgcacgatatccggcttgaacgtgtacaacttcatccagaattgcatgaatccccgtataaaaataagcagccgtgagaacacgctgcccgtgatatacgtttcgactcgctgcatggcatacatttccgagatcgaagaatcctcaatgtttttgatgacactcacaattccgcccatatccttcaaggatgatccaacaaccaatacttttggtttcatgatagactcctttttttcatggttaatcttcagaccacttacagactattcacgtaatttttgatggatgagatcagatcagactgttttctcacataaggctggaacgtcagctcttctatgcaaggaaccagtttttgtaattcagcctgactctccgcgacggccacatagccgttatcctgaaaaaccttggagatttcaagctgatggtcatccacatgttcgccccattctttccggcgtggaatgacaataacgggcttgccgcgttcaagacaatttgtaatggagccaacacccgcatgagaaataatgcatctgctgcgctccacatattcattcatctcttcctgcgcgaggaaaggaatcacagtgaaattccgcggctgatactcggtatatccggattgggcaacaacctcttcttcaataattcctgcctcaatcgcctcatcaataagctcaaacatccgattgaagggaaaacgctgggttccaacgatagcaaatatcaaaataaagcccccctgtacttcgcattgggatagctatcctgcaacgtttcccattgaatgaagaactcatccgagattttgtacatcaatctcccggtagcgctggaggaatagattttggcataactttcgatataaatcagcttggcaccgaagattttaccaatgaggcaaaaagggtatgtggctcccgcccctgttgtaatgatcacctttggacgctcacgcagatatagaaagaacgatttgataatattagccacaaagattagcaagaacatcgcatttttacgctcttgctgcattaagaagtatactttgccctgagacgattctacttttctgcttttattcttctcggtaatcaggaaataatcatgttcttcaaccgcaggaataattttggttaattcatcaaaatggccgcctgtagaactgatcaaacagaccttcatgttctaatctcctttgaaaaggatacgtccttggctcgctgtatctgtatatccacttctgcttcagcccctgacttggaatggactccatttcccgtagcatataacgcgttcaggaagatacagaatggagcaatcagatgaaccgtggacagggtattgtcaaaaaaggaataggtcaggaaaccgataatcataccggcaaaatacaaccggatcatgccgcccaatcggaagtaaacagcccgaaacaccagcagcagcgatagaaacaacaggatggctccaactaacccgccatcgtaataaaaacgaatgtattcattatgtggaacaacgaagccggaaaaaatacttccatcattcgctacgagagttgagccgagcccacgtccaaatatcggatactcatttgctttgccaataaaataattccaggctacatcccttcccgacaagcctttgctctctgacctcatctcataattgtcccattgcgcaatcaccatataagccacagcgacaacaaacagaatgagaggaataatcgcactgactctgcctttgatgaaggctttcagttgatcaaatagatagaccagtataatcggaataagcgcaataagtggcccccttgttcccgtctggaccagaatgaccagatgtgtcaaggtaagcatgtaatacagaacaacctgatggccttgcttgatctgaatcagacaaacgcagattgagataaaacacaacatggccagatgcgcagcgatgttagctccctgtaaccgggttacacccgacatctccaggttagtaatggacaatatgccggcgagttgcagaatataaccaccagccagactgaacagcggcaaccatgcgagtacacgtataattcgttgactgatctctcttgaaaaatggggcatcagcaacaaaaaaggaacaatgactcccagaaaggccttgaatggatcgagcggactaaccttactgggcagatcagatagaaaataactctccacaaataaaaaaccaatcgccagtgcaggatatatcaactctttgcgaataccaaagcgtagaaaaagagagacgacaaaacccagaatcgccagcttatagaaggacagtgaatccagtcctgccagatgaatgctaaatattttatcaatggacaatgaaaaacttacgatgagaatcataaaaatccagctgggctgtttaatataaacgcccagcagaatcacagctatgagtgcaacaaccgagactagcggaagatagattgctgcgaagacaattaccagcgaaaaaagaatgatattaaacgacttcatatttaatgcagcaagtataccggtcttttgcatatctactatgccacctcaaagccagaatcgtgtttcaaaacgcatccttcgaacctaccagcaccttgaacgttctgaagataattttgatatccaccatcatgctgcgctcacgggcatacgtcagatccagctccaccatttcctcaaaaccaacactatttcgaccgctgacttgccataatcccgtacatcccgggatcatctgaagacgttgtctgtcataggaagtgtagttctgcacttctctgggcagagccggtctgggtccaacgagactcatctctcctctgaacacgttccacaactgtggcagctcatccagactggttttccgaatgaacttgccaatccgggtaatgcggggatcatttttcattttgaacatattcccgttcacttcattctgatcaatcagctgttccagcagatcttctgcattcgcaaccatcgacctgaatttgtacatatgaaactctttcccattctgtcctactcgtacctgacgaaaaaaaacagacccctgcggggcctctattttgattagtaatccgatgaccgcaaacaaggggcacaaaatgatcaaacctatgaaagaacccagcaaatcgagcattcttttcataaatagatacactttatccgcattttgtcctgacatcgttgatgcattgtaccccagacttgggtccataacaatctccgcttccttcgattggggagatggactcattcaaactcccccccggctacatgttctaccgactctttttccagaatctgttgcagagcttgcagcattggaattctaagttcctgtttttgcagagcgaagtcgatggttgtcaaaatgaatcccagtttctcgcccacgtcataacgtactccctcgaaatcgtaagcatacactccttgtgtctcatttaagcgctgaatcgcatctgttaattgaatttctcccccttgaccaatctcttgttgctccagatgttcgaaaatctctggactcagtacgtatctccccataatcgccaggttggaaggcgctgtgccttgggcaggtttctctacgaacctgagaacctctgtcaaacggccatccgattgaagcgggtccacaatgccgtatctgtctgtttgttcagccagtacggtttgtacgccaacaatggaatgttgaacctgatcatattgatcaatcaattgtttggtgcatggaacttccgatacgacgatgtcatctccgagcaacacggcaaaaggttcgtcaccgataaagttacgtgcacaccagacagcatgaccaagtcctttggcctctttttgtcttatgtagtggatatccacgttagaggatttgcgaacctcttcaagcaggcccagcttccctttttccagcaagttatgttccaattcaaaagcgttgtcgaaatgatcttcaattgcccgcttccctttacccgttacgatgatgatgtcttcaattccagaggcaatggcttcctcaacgatatactgtatggttggtttgtccacaatagggagcatttctttgggcatcgcttttgtggctggcaaaaatcgtgtacctagtccagctgcaggaatgattgcttttctcacttttttcataaataccaccctatcctctttttttttagtttgataaaagttgaaccagggcatctaacccgtcctcacgtcataccttcgacgattaacgtctaaggttcattgaacccacagcatgaccgagtgcctacggtgataaaggtgcagtagacattacctgtttacttgggagcattggatggaaggtttacttctctccgtagcccaccggaactgcagcgtttttgatattgttcaggattgcgcccaggattcgtgcattcacatgctccagagcagccttggtcttcttcaccagttccttcttgaccttgcccgagttcacgaccagcaacacaccatcacacagcgaactcacaatgagtgcatccgttactgcaagcaccggcggtgtatcaaacatgatgacatcatattgatcctctaacttctcgatcagccttttcatccggttggaaccaatcatctcggaagggttcggcggaattgggccagaagtgaacaattggagattgtcgatataactctctctaagcacgtcttccacactgtactgattagacagcacactactaagaccgatatgattcggtacagaaaacacctggtgcaaggaaggattacgcagatccgcatcgatcagcagaactttcttgccttcctgagcataggttaccgccaggttgctaatcgttgtggtcttgccttcgccggattcagcggaagccaccatgatttttttgatatgactgtcgattgaggagaactggatgttcgtccgtaatttacggtatccctccgagatctgagatttggagttaaaataggtcaccagactgttattttcattggttagccgcgacatatttgccatcccccactttctgttgagatacgtaatttttcgtatttttcagatcgtcttttttcattttggatatcacggtaagcacaggtaggcccagctctttttcaagctcagtttcggatttgaatgtgtcatccagataatccatcaggaatacgagtgcaatcgcgagcacaagacctgcgaacagactgacaatgatgcttaatgtggttttcatattgattggagatgcattactatccacttttgcttcactgaggatagccacattatcgattttcatgattagggggatttgagattggaacacgttggagatggcattgaccgtttttgcggctttttcgtaggtagtcccttgtacagttatgctcatcacttgggattcgctggctgtagagacggaggtgctattcatgagctgagcagaggttaagcctaggtccggatacgtggtagcgactttatccataatggcggaagatttaataatttctctgtatgagttaataagtttgatattggtttgtatcatgctgaagtccatcatcgcctggccttgaacgttagaggtctggtttacgataagcttggaacttgcctcatagatcggttgggtgaagaaaatacttttgacccctgcacccacacccgctaccagagcaattgcaacaatcaaccaaagtttcttttgtaagagtcgaaaatatcctttcagttccactttcattcctcctatacgttgtgatctatcctatgtaactaccagatggacagtagccatttgcgaggtttccagcgttctgtgaccagacacgaattcgatagaatatgcgacgcattctctgccagcctcttaacggcttcagctccaaatcgacgctcgatggcccgctctccttcacttatggcaaatgtccttttgcacgtatcatgtgcatctgatgaaatgaaatgaaacccgttttctttgcaaaaatgaaaacaccactgccgaactttccgtccgaaaagcccagtgaaagattgagctgtgagctgacatagtccgccttgactcaagtaatcagccaacaactttggcttcttcaaaatgacacgattgcgttccggatgagcaataataggggtaattcccgctattcgtaattcatgcagtatcctggggaactgtgagggaatatgaccaaagggcagttccagcaacatgtaacgacttccggcgagtgtgcagcactttcctgcatataagtctccaatcaggttgtcatgtaccctgatctcctgtccgggacggatctccaggcgaatgttgcgtttgcgaagttctgcatgaagcaggttcacggcctgattgaccaccatcggttcattgttgtattgcccgttcaggtgatgcggagtagcaataatggaggtaattcctgaggctgccgccttctcagccatcgcaacggactgctccattcgaacaggaccatcatctaggccggataatatgtggcagtgcatttcaaccatatccaaacttcctgaaatagtatgagccccctcgcccctttattcattgcgcaaatgcttttggtgttaaagaactaatgcataacgctatgaaatatagtaaaatggcgttaagtacatgttttgttcagaaaatgttaagaatcgacttggaattatatggtgaaatcaatgtaatgatagggttcctgcagagccttttgttctgttgccttttcatactgaaaacgggaaaccgcgggaaactgaacttcagtaagcattgtgtttaactgtccagttatatatagtttctgttcgtgctgaatatgcaagtttgaatgatacattgtgagctctccgaagggctgtttccactgcaaccttgcgtgaagtcgtacacatacatgttgatcttcaacatccaaaccaatgagcatttctgatgataccggcaagttcaggtcgctcaggaaggtgattgcttgagtgtccattccaagtaacagaacagggcgtcttttgcggtctaccattttcccgtgaaactcctgaatgtacatatggacatttaatttcatatcagcccattcctgaattattgaatacatggtttcattcctttagaatggattagcctacatggactgcctccacttccttctcacaggtatatggtccaggcaacaaggagatacttaaaatattccaaatgatacattttgtaactccatacgtccaatttacgatacaatacgtatcatgtcaagcggtatttggacatggttcttttgatttacgacaatttgagatgtccttagacagacctatttacaaatggaaatgggttaaaggaaacacatgaggagttactcttttgcaggaaagctgccctgatcaaacacttggctcaggattgtttcaatatatatttgatgtcgttcagggggaaatagcttatgagctacggaaatcgcattgcggaattacgggaacagcggggacttactcaagaagaacttgcgagctccattcatattacaagagctgctctctcccactacgagaagaatcgacgtaaaccggatttcgaagtgttaacgagacttgctgacatctttgatgtgtctatcgattatcttataggacgtacaaagcaaagcgatgttgtgatggatgaagacgtacgtgaattcgttgataccttggagttgtcggataaggaagtgttggaacgcttcgatctgatgattgatgggaagtccttaacagaagaagaagcacgtcgttttattgcatttgtccgaatggaacgcagtatggactaaacccgaaaagaggacccagttcccgagagataacatctctggcttctgggctttttttgtgacttaattccctttcattccatgcttgtctattgtgtcaaggacgcttgttgttgacggaggatacgaaatggttccaacgctccgggtcgattccgcattgcagtaacaccttcatgatgtccatctgggttgcttcgacttgtttacctgtcggcctacgatcgtccctgtttggatgcttcatattcattccgctaacctctcttatctttatactttccctgccctccaaaactagccttattatacttgagaaagttcctcgatgttgtcgtctcatggcgataacgttttttgatggggttctaattttgtcgaaagcaaaataggagcaatatggtgccggaatggcaaccatattgctcctattattcttaatacaacctgttcatgcacttacaccttggaataaggaagttattaacctccagcacgtgcaagttcacgcatattcgcttcaaacgctgcaagcagcgctgcttctcccgtcaaacctgttgcctgaatccgttcgatctgttctgtcatacgtttgaagtccttaggaataacccgaacgaactgattcagcgcatcttgccagttatccagaacgcgctgaccgacagcacttcctgtgttggcaacatgacgttgaatcatgcctcgcagatctgcactttcggccacatcttcgatacgttccaaaagaaccatttccagattacaacgtttcaggaatgtgccttccggatcatacacataggcaatacctccggacatccctgctgcaaagttacgacctgtatcgcccagtacaacgacacgtccacctgtcatatactcacaaccatggtcgcctacaccttcaacaactactttggcgcccgagttacgtacagcaaatcgctcacccgcaataccacggatatacgcttcaccgcttgttgctccgtagagagccgtattaccgataatgatgttatcttccgcctcaaacgttgctttcggagaaggcatcacgatcagtttacctccggacagtcctttacctacgtagtcattggaatccccttcaacggtcaaggtcatacctttaggtacaaaggccccaaagctttgtccggcagagccgacaaatttgaatttaaccgtatcttcaggcaatcctgcgagtccatatttgcgtgtgatctcactacccaaaatggtacctactgcacggttaacgtttgtaattggaagcaccgcttcaaccggttgaccggattcaatagcagactgtgccagtggcaacaattgttgcatatccagcgtttcttccaattggtgattctgatgctgtgtacggtaacgtgcagagccttccggcatttcaggcacgtgcagcaatacagacagatccacaccttttttcttccagtgatctacggcttctaccgtttcgaggcaatctgtacgtccgaccatctcctgaatagtacggaaaccaagatcagccatgatctcacgcacatcttcagcaacaaatcgcatgaagttaaccacatgagctggatcacccatataatttttacgcaattccggattctgtgtcgctacaccaaccggacaggtatccatctgacagacacgcatcatgatacagccaagtgcaacgagcggtgccgtagagaatccatactcttctgctccaagcaaggcagcaatcgccaggtcacggccgttaagcattttgccatctgtttcgaggacgacacggtcacgcagattgttcaacatcaacgtttgatgtgtctctgcaagacctagttcccaaggcatacctgcgtggcgaatcgaaccttgcggtgatgcacctgtaccaccgtcataaccgctgacgaggataatgtcggcacggcctttggctacaccagctgcgatggtacctacgcccacttccgatacaagcttcacgttaatctcagcacgcggattggcatttttcaagtcatagatcaactctgccagatcttcgatcgagtagatatcgtgatgcggtggtggcgagatcagacctacacccggtgtagatccacgaacttcagcaacccaaggatacactttacgtcctggcagctgtccgccttcacctggtttagctccctgtgccattttaatctgaatctcatcggcattaaccaaatagttggatgtaacaccaaaacgtccggatgctacctgtttaatcgcactgcgacgggaatccccgttgctatctttaatgaagcgagccggatcttctccaccttcaccggtattggatttacctccaacacggttcatagcgatggcaagatcttcatgcgcttctttactgatcgaaccaaaggacattgcacctgttttgaaacgacgcatgatatcttctacggattcaacttcttcgagtggaatggaagctcccaccggtttcagcttcagcatggagcgaatggtcaacaattgatcattctcaccttgcacgagcttggaatattttttatacagcttgtaatccccagtgcgtactgcatgttgcagggtatgaatggtttgcggattgaacagatgctcttctccgtcgttacgccattgataatccccaccggaatccaatactttatcgttaccgtctttttccgtaaaggcacggttatgatgtgtcaacgcttcggctgccacttcttccaacccaattccaccgatacgggaaggtgtccaggtaaagtaacggtcaacgaagtctgatttcagacctaccgcttcgaagatttgagctccacgatacgattgaatcgtagaaatccccattttggacaacactttagtaacgcctttggtagctgctttaatgtagtttttcactgctttctcatgcgagataccacgcaacaacccttgctgaatcatgtcatccagcgtttcaaaggccagataaggattcaccgcacttacaccgtaacccagcagcaacgcgtagtggtgaatatcacgcggttctgccgattcaagcataatgctgactttggttctggttccctggcgaatcagatggtgatgcagacctgctacagcaagcaatgcaggaatggcagcattctctgcgtccacaccgcggtcagacaggatcagaatgttatgacctttgtcgataacacgatctgcagcttcgaagagcaaatccatagctttgcgaagtccttctgccccttccgcagcggtgaagaagattggaatcgtcatggagcggaagcctgggcgacgcacatggcgaatcttcgcaaagtcttcattagacaataccggtgtatccagacggatctggcgacaactctccggttcagggttcagcaagttgcgctcaggaccaatggttgttgccgtagacgttacaatctcttcacggattgcatcgattggcgggttggttacctgggcgaacatctgtttaaagtagttgtacagacgctgcggacgatccgacagcacagccagcggtgcatcataacccatcgaacccgtagcttccatacctgttgttgccatgggctccaggattttacgcagttcttcaaatgtataaccataagcgagctgaagctgggtcacgttatcatgttttggatcaggaagttccggtgcttccggcaactcgctcagatccatcaaatgctcatcaagccaatcctggtacggattctcggctgcaatgattgcttttacttcctcatccgcgatgatgcggccttcttgtgtatccacaagcaacatccgacctggacgcagacgatctttgtacaggatctcttccggcgcgatatccagtaccccaacttcggaggaaaggataatacggtcatctttggttacataataacgagctggacgcaaaccgttacggtcaagtgttgcaccaatttgcaaaccatctgtgaaggccattgctgctggtccatcccaaggctccatcatcgtgctgtgatattcataaaatgcttttttggcagggtccatgccctcatctgtgctccaaggttcaggaaccatcatcatggccacgtgtggcagagaacggccgctcagatacaggaactccagtgtgttatcaaacatggctgtatccgaaccgtccggattgatgaccggtttcactttcgcgatgtcgttaccaaacaactcgctctcgaacaaggattgtctagcatgcatccagttcacgttaccacgcatcgtgttgatctcaccgttgtggatcatgaagcgatacgggtgggcacgttcccagcttgggaaggtgttggtactgaaacgggaatgcacaagtccaatggccgattccaagagttcttcctgcagatccaaatagaacccgccaacttgttcagttgtcagcatgcctttatatacaattttgcgacaagacatgctcggaaggtagaacgaaccaccttctgcttcatctgccgaataacgaatagccagctcagcgcgtctgcgaataacatacagcttacgctcgaatccaagctcatccttcacatctgcggatcttccaataaacacctgacgtacataaggtttcgctgcaagtgcagaacggccaagcatctcatcaaaagtaggaacatcccggaaacccaggaacgtctgaccttcttcttcaataatcttcttaaggctctcttcatgcgcactgcgaatggcagggtcctgggaaaggaacaacatccctacgccatagaaaccctgttcaggcaatgcaaaaccaaggcgtttcgcttcctctgcaaaaaagcgatgtggaatctgaatcaggatacctgctccgtcaccggaattcggttcacttccctgtcctccacggtgctccatgttactgagcatggtcagtgcctgactaacgatatcgtgtgaaggtactcctttgatgttggcaacaaaacccattccgcatgcgtctttttcgaactgcgggtcatacagaccctgttttggaggtaatccgatgtgtctcatggaacgcaacctttctataatgaagtatttcggaaagatcaagaacataggcaacaggcaacaatgaaacgggaggagctggcctttcgcttgcgatagagcctgctagatagaagaggtgacagcatgagactgtcaaaaataatgcctgctattgggcagaagccattaaatgagatgagctgatccggacgatccggcaaacagcctgtataaatcaacacgcagccgctggcacggctactgaaatggagcgacgtttttttgatatagttctattattttaacaccgacctaacatcagcgcaatttaaactttttaatacctctgataagaaatgttttgcagtacagctttacagtagtgacgtttaaattcatctctttttcgaataattatacactttttaagccagagtacaactgaattaaattgctgacagaagaaaatcgttccatgtgccgcctacgtttatccataattccaccaaattttcactgcttaagccagcgaaactttacttctctatgcatttgtatataaaataacctgcaacccctttttggggtcacaggctatttgcactatttgactactatattgcataatttcactacaagaaaataaagttttttttcaaaaatatgaccctgctgaagatcaggttcgacttatgccgtcacaacttgaccagaatcagcctgttcgacttcttttttcggacgtctgccattccagaggaagtaagcaagcgtcagcagaatggatacacctgcatagatgctaagaatacctgcctgatgccacatcacatccagattaccactcgataccacggctttgaagcccataatgctgtgtgtcattggcaaccaagggctaaatgcctgaagccatgatggaatcagttctaccgggaaggttcctgcactagccgcaagctggaagaccagcagcagaatgacaacataacgtccaggcagatccagccaggttacaagtgcctgaacgatcaacatgaaggtcagccccgtaataatggtaaacagatagaacagccctacgctgtgcgtctcaagtccaagaccatataacatgaaacttgccacgataaccgattggaaaatactcacggagccaaataccagtgtccggctgacaaaacgattccagcctgttgcaccaggtacggacgtttcccgcattttcaatacaatcgtggaaatcaacgatcccacaaacagaccgatcgacaggaagaacggtgtcaatcctgtaccataattgctcacgttctctgctgtgttctccgaggagttcacaggttcagcgaacatgttcactacatcatccgttttcttaacttcggatgttttctgtgcggcatcattcagtttggtttccagttcactcgagccatcttttagctcagtaaggccgtcagccagtttgcccgcgccatcacccaattgcttggaaccatcggttagtgaactaacgccaccactgagtttacctacacccgtttgcaaagctgttgttcctgagcccagctgcttggcaccatctgcaagcaatgtaccgccacttgcagcatcacccaatttgccgctgaactgcttcaggccatcggatagcttagcgcctccttgactgagctgccctgcaccagccagcaattgcttctgaccatccaccagttggttcgcaccagccagaagttgctcctgacctccatgaagctcggttgcacccgcagccagttgctggttaccctgatgcagctgatctgcaccttgtgccagcttctgctcgctctcattcaattgtgcactgccgtcagcaacagcctcacttgccgcaagcagcttctgtacatccgcattttcagccagttcggggttcgatgcagcaagctgtttcaatccggcggctacgccctgtgcaccatcagcaaccttggagctgccatctacagccgattgcaggcctgttgccagagtgccactgccctgaacagcactttgcagaccatccgacagctttgcactgccctgttctgatgattttagaccagcctgcaacttacttgtgccatccagtgaagactggagtccggtttccaacttggcgctgccatccttcaactgatctgctccgctctgaagctggctcgaagcagctgcctgaagctgttgcagaccggatacaagatttgatgttccactttcaagcttggttgcccctgtatgcagcgcgttaacaccatcacttaatggagaaagtccttcctgaagttcaagcgttccggatgcaagcttcgccaggttatccttgagcttaacagcaccatcatccagtttgcctgcaccggtattcagttcaccagccccatcgcctgcctcagtcaagccatccgatacttcggagaacttgtcgagcaatgtctctgcataagattccgttactttggctgagacttttgctttcaggtccttaatagctgtcttaccgatctgtgcaccgacaaagctgtaattgccattcggttcatagatcagatcagccggctccggcttgtcatcgagcaatgttgttgcttgggatgagaagttctccggaatcgtaatttgcatataatatttgtcattactcatgccttctttagcttgactggcactgacaaaatcccatttaaaatcggcatttttcttcaactcatccaccagatcactacctacatggagggatttgccctccagctcagcgcctttgtccagattaacaacggcaaccggcatctcatccacatgaccatacgggtcccaataggctgccagatagatgccactatacaggatcggtataaacataattgcaataacagggatcaacacctttgggtttctcacggccgatcccacttccttgaaaaacacggataaagatttcatgtcattttctccccttaatctctctgctccatgagcaggaataaccataatgaaatacaatatcgcattccagaaaacatactgaaacacgaagtgaccactttcctcaaacggtcactttaggacaaaaaaacaacctgtcttccgacaagcctccctgcttgatacgcgtgaaaatccttatattatagtagattaaatttggattacgttacagcagcaattccttccattaagaaaaggcgaaagtaagtcttaatttcctctttgctcagcggttgatgttgtttgctccagtctgaggtgagtgcaatatacaggcgaatcatcataaatgcgacgacttgcggatcactatctcgaatctctccattgtcttttgctttctcaagctccttagccagaaagtcggagattactttctccaccttgtccaagccttccttggcctgcagcgttccaaagtccttcagctcctgagataacttaacgagcagatcgtgatcacgacgaaactctaacaaggcatccagtacccgaaacagattatcgaaaaatgcactttcctgatgtacttcacgatgcgcgatgttcttcatttcctgaatcacttctaccaggatctgatcaaacaattgttccttattggtgaaaaacgtatagatcgttcctttgccaacgttcgcaatcttggcgacctgatccatcgtcgttgctttgtatccaaacatggcaaacgactgggctgctgcatgaataacctgctgtctcctgtcaatcggagccatctaatccctcctttaatcacattcattgttcaatcgctctacataaatgaccagaaatacaattcggtcattcggtcaaaaactacaataccaccttcgaaaacagattgcaaccttaaaattttaaaaattgtgttaatattttttaacctaaatgcagtggaaactccttctgtcgtcgtctatagtgtaagatgactcagataatacgtgtatataatgaagtttaagttgtctcattgtatgatatatggtgtaaatattcatagaagaaacatgattttgtgcttcaatgtatattcatgtagtaacgcattccatagctagaataaacaatgaatatcttcattttgaattaaaacttatgaataaaggtgaactcatgcgaaaaccaagagtgctcttattatcggaaggtttcggtaccggtcacactcaggccgctcatgcgctggcacatggcatcaaaaaagtcagtccacatgttcacagtcgtgtcattgaactaggcaaatttttgaacccaacggtagctccactaattttctctgcatatcgaaagacactatcggttcaacccaaactggtcagcctgttgtaccgcacacagtacaacaaatcactaaatggttttaccaagctggcgttgcaccgaattttctatacacagacggcacaggtcgtatctcaactgaaaccggatgcggtgatctgtacccatccttttccgaatgctgtgatctcccggctcaaacgccagggtctgaatatcccgctctatacggtcgtgacggattatgacgtgcacggaacatggattaatccggaagtgaacaaatatctggtctctacccctcaggtcaaagcattgcttgagatccggggtgtcgatccctcccatattcagatcacgggaatccctgtgcatccagacttctgggaagcaggagataaggtgaagctacgggaagagatggggcttcagaacatgcctacggcgctacttatgggtggcggatggggactttcgtttgatgaggatcatatgaaagctctcacgtcctgggcagatcgtgttcaattggtcttctgtctaggaagcaatgaaaaaatgattgcaaaaatgaaggaaatgccttgcttccagcacccgaatattcgtattttgggatatacacgggaagtaagcaaactgatggatgtatccgatgtgctgattacgaagccaggtggcatgacatgcactgaagcgctggccaagggtctaccgatgttgttcattcctccgattgcaggtcaagaggaagagaactgtgaatactttgtacaagccggatacggccaggttattcactctgccgacgtgattaccaatcgtttcagacaactagtggagcaggcatctactcaaactgaaagcccgctgaacgtagcgcatcattcaggtaaccattcggtctatgatccgaagtgctgtgcccaagctgttcatgacttattgtttccgacgacagccgaagtcacaacaacctccttggagcgcttcacagccggaattactgccacgtccttgtcaggtaccagaataccattctgacgcctctacggacctatagaacagctctcacgaggtgttattggggacaagacaattgctcaagatatacaaagaaggttcccttccgaatttttggaagggaaccttcttttattttcactcattccaccgtatgatttggcagaaaaaagggtaatttagagtataacgatatttttaaataacgaaataaaactacgattcaggctttttcaagggccgtgtgaagcacacacagttaactaccctgcctgtttgcagaatttacgggtcgattacttgtaaaaagtatgatgaccgatcgtttttacttttttctgcgagcgggcaactgtcagatcgtcagcaagcgtcaatgataagaaataatacgtatcatcggcaacttccttcttcccgttcaacgcagcattcactgctttgatgctgtcctcgttgggaaccacacgtttcatacgtccgttcgctacaggactaaactgggatttctgatggatgaccttgtaaatggtatcgggaaaattggctgaccgcagccggtttaagacaacattggcaactgccactttgccttcgtacggttcaccttccgcttctgccatgacgattttttgcagcagatgcagttctttatcggacacactgtatgaccaggttgcaagtttcgagtcttcctggttcagaagtttggtccgtgtaaagtatagtttttgggggggagttgttacagcagcgacttctttggcacgtttcactttagccaatttcagtgcagcttcttttttggctttggccgcagctaccgctctagctttgttcttggccttggcttcttgcaattcctgctcttcttgagcagtcgtcagccagttcttcgctggcagagattcagtccacgctacggtttgggcagacagattagaggacagacttgtcccatcttccatcatgcgcctctcttcttgcgtagatgtttggttattttgcccagaagccgcaagttcggtcatctgtttactatcactagcttcattccacttccccgtcgcctgaacgacatttacccccactatacatacaagcagcactgataacatcggtgctacccaacgatttttgcttataatgttcattcgaagattcctcctgtcgaaacaattcccttaactaagtaacccaaaaaaaagaatttgaataacgatggctaatattacatagggataaacgttatgtcaatgtgattttatggcataaaaatgattatcaggaaaaagtgaacgtatccacgacctcatacattggcgattgtcccagccttgtcacataaagtacaatgtcctccaccatccatgaattaacacctgtggaatgttccggaagcactccagatatccctttattttcattacctggaagctgtcccagatattttctggcaatggtaatgtggggagcataaggtcttaattcagcttcataccccaggggcgaagttgcctgcacgatttgtttttgcaatgaaaacaagtgctctatctctccgctaacacctttccaaagcaccttaggtgcttcttcaagtccaaatgtgccccagtcggaaagctgaagttcaaacggctgtaatccgcttgttgctgagcgcaatgcttttcgcaggtgcccgatgtcactaactaatgtatcccccagaaattgcaaggtaatatgataatctctatgatctgtccatttacgaaaatctagcttgttctgtacaagccttgcatccatctgaagagactgctgaacagcaacaggaagacgaattgctacaaacaatctttcccgtcgggatgaatgatcctgatgtgattggttattcattgcatacacctctctaaagttcgctctattatttcataactatacatatcgtttcaagttgggtaagtatagagtgacacaaatataaccatttgcaaataaggctagattcctgcatttcccaccttaatgcacatccaacaccaaatctgatacactttaatcatcaaactcatcaaactatttatctcaggaggaccacacattatgggtaaaattgtatgttttccatctctatccgaagaacagcaacaacgcattcagaatgctgcaccagaatacaccctgaaattcggaaaagccaaggaattggaccccgctgagttgaaagaagctgagattattctcggctggtccccactcgtcacagaacatgcattgaaacaggacggcctgttgaagtgggttcaggtctggtctgctggtgtggacaatctccccttcgcagatttgcaacaaaagaacgttcaggtcaccagtgcaaatggagttcacgcgattccaatcaccgaaattattctgggcatgatgttatcccacagtcgctggctgagacaagctatgctgcatcaacagcaggccgaatggaaagctcctgccaaaccactgccggaactgcatggcaaaacagcggtcatcgttggtgtaggtgagattggcacggaaacagcccgtattctcaaagccctcggcatgcacacaatcggagttcgccgctcaggtaaggatgtccccaatgtggaccaaatgtacgacatgaccggtttacatgaagccttgagccagggcgattatgtaattaacattttaccgctaactgatgaaaccaaaaatatatatgatcaaactgcatttgagcagttccgatccggtgcctgcttcgtcaatgtgggccgtggccccagtgtgaaaacggaagcgttgctgaatgcactccaaaacggtcaagttgctttcgctgcactggacgtattcgaagaagaacctcttcctgcagaccacccgctttggagcatggataacgtgttaattacgccccatatcgcaggaagtacagagcaatacgcggatcgagcagtcgatattttcgtcaaaaatctggaagcttacgtcgctggcgataccctgccggtgaaccttgtggattatagtcataaatattaacacaaacacccgttcccatgcaatattgtgcaaatcagatcaacgataccaattgatatgtacgcaataaaaaacgctacctctgggaaatctaaattcccttagaggtagcgtttttgtttttttacgcttacatacacagccaaatatgacgtataaacgtgcctttttgtactgttcggtactcttttacagtccatcccgcttccaacaagtgctcttctacccactctgtggaaacaatcactgcccgttttgccaatctgcgcaaactctccagcatggctcgttgctcagcatctggaagtacagagcagaggttatagggcatgtccagaattgctgcatcatacaaaccttgcagttcattcatattccccagtgtgattcgatctgaatcatatccataatgcggcagattgattcgcgcacctcggacagccagaggattgagatcgttaccttttgcatcaattcccatggataaagcctcaatcacaaccgttcccataccacagcatggatcaagcaaccgatggttttctactctcggaacagcaatgttaaccagcgctctcgcgagcgtgatgccaaatccagttgagtaattttgcggcttctgccggtgaatctgccatgatcgatccgcttctgtccactggcccaagatccatttttctcctgttcggattaggccgaaagtcaccttaggttttttcatctgtgccttgcctttaatgcacatgccaacttctttttccagttgacgagactgtgcataatcaggggcttgatccccttcttttagacaaactaccttgaatgtctcatctggcaacaggtgaatatttttggcaaaaggaagcagatccatcacagtccccccttcgccgatcacgtctagtctgccgtggataaaaggactgcgtccaggtggaatacatcgttcagaccacacatacgaccccatatccatacggatctccgaactcggttcaagcagcgtagtcagctccagcatgcataatccttgctcgttctcgtggcaagcaaaggtgtagaggtgtttcccagaagtagcgtacataccaagtgtttcatcaggcaaaattcccctctccttccttcattaatcatgtttcttctatataaatagtaagctcattgaagacatatcaaatacgactcatacgtttgctttcaggtagtcattgtatacaatgttaggctcctagacaactatccatttccttgcacgtatctatttggaagaaaaaaaataaggtgttcccatgttgaggaacgccttactttattttgagattataacattggaaatctaatcgtccttgccagtaaacgttataggccaacagctcatatatcatactgatttctcaccattagccgcctgcgtgattccagcttcttctattataagagcaaggttatatttttaatttttcaatggatgtaagcaaatcttcggataattctttcagactttgaatgttgccgctaatcgtttccatagaacttacttgctcttccgccgatgcagaaacttcttccacactcgctgccgattgttccgaaacagcggaaatctgctgactgaaatcattcattcgtccgcttgcttcctgcatgcctgcgagaccatctgtcatagtgccgatgacaccaaccatgccttccaccgattcattaattgtacggaagagttgacctgaagtaagcacatgttcctgacccagttcggtctcctgaacgttcgtacgtaattccgcaaccaccccttgtgactcctgctgaatatcctcggtaatcgccgtgatctcttcaaccgaagtctgcacagcctcagataacttcctcacttctgatgccactacggcgaatccgcgtccactctctcccgcacgcgctgcctcaatggaggcatttaatgccagcagattggtttggcgtgcaatgtcatgaatgacttgaaccagcttggaaatatcttcatttttacgattcaaccgttccattttgtccatggaagccgagaccgagccggaaatctgttgcatctgctgcaccgactgttccatcaccttgcgaccattcagcccttgttccagtacaagatccgacatgacgcgtagctggctaccttgttccgtatgactctgaatgtgatcattcaacacttcaaccgtacgagctgattccacggctgtctctgcctggctctctgcggccttggctgactcttccatggtcacagcaatctggcgactaccaatcttaacctcttctgaggatattgccagttccccactttgtagattaacagcttccgcaattcgtctgacgctcagaaccatggaagtcaggttacctttcatgtcattcaccgctttggccagaacaccaacttcatcctcatgtttggtatgtatgtcctgaacattcaattggccttctgcaatcagtttcaccgcactaatgacacgtagcagtggtttcacgacctgtgaacgaataatcggaatgctgatcgctgtaatggcaatcatgacaagaacaccgataatgatgattaatctaccatcctgtaccgatctgatcgtttgggccgccgcaagattcgactgttcctgattgtattccacgagataatcaagatcgacttgcatggtgtcaaaggaatcagcacctttatcagctacttccttcgccagctgtgtctgaccctcatcactcagcttgatcgattgcgtattaatcttgagatacgcttcccatttgttcttgaacgcattccagtgttcgagctcttccgcagacttctcctgctgatcatagattttaatcgcctgcgtcgtttcacgaatatacttggtacgctcttctgacaaaaatgccttgtctgtttcatccgcgtcaaagtgacgataactcagtgacaggacatgctctgtggtataatttaaccggttaatttgctggattgatggcatccaattgttcgtaatttcgttagtgttggtttcaattgaattcatccgggtgacaatcgtgacactcaaaataattaaacagaggattaacaagtagaacgcgatgctgatacgcagaccgatactcttgatcttgaatctgctgaacatatgatttcccccttgacctcttcggtcatcccgaattcaggtgcttatgtcattgttttcccttcttttgacctcttgtcaaaagaacttctctatattatatcgataggaaaatagacgtaaagtattataacattattttgtcattaagatgcttgattttgtaaaagattgttgaatcttgacaaagtccaaaccgaagagctgcagcatacggtaaagtcccgatctgcagctcttcggtttgttcggatttcaacggctaacatcataaaatgatcagcctagttcagtattgccgtcttatgctcagccagcaatcgatatgaatccaacctgcgctcataatctggtcctgccgtaaccagaagcaacctctccgtatccagcctgcgactcacctgttgcaatcgcgcccatacctgttcaggtgtacctgcatagtgccgtaccgattcattttgatcactaacggcctcatcattcgtgtcagagcccgcgataccgcttgaattcagctcggttgaacgttctttcccatctaacttgcgcctctccgccatatcaaggctccagtccaaagcatccgtctctgactcggcacacaatacgctgactgccaccataacctcaggctccttcatcgttgcactaggcataaatccttctcggtatcgccttacagcctctgtaccatcggcatcactcatgaattgaccaaagacatatcccatgccaaaccgtgccgcatattctgcactcttcacgttagttcccaacatccagagagataacggaagcttgggaatcggacgagctgtcacgggatgatcctcgtacatgtagcggtcttcgagcagttctgtgagtgctgcgagtgattcaggcagcttggacacatgctgcaagtaattgccactgagtgccatcgtggcatgaggtccaccgccaggagcacgtccgagcccaagctcaatgcgccccggatagagcgcagccagcaggcggaatgactccgcaaccttgagtgggctgtagtgtggcaacaagaccgcaccagagccaagttggatcgttgttgtccttgctccgatgtgcgataacagtacttcgggagaggccgatgccagttcagccatatcatgatgctctgacgtccagtatcgggcgtatccccaagcctcggcatgttgcgcaagtgtcaccgattgttgaagcgcctgttccgctgtggcatcgtttagccttggaacaaggtcaagtacgcccagactgaacgtctcactcattcgcttagccacgcgtctcatctccctttatatcggttaattttaatccaaatcgtagatcgaacccaccttcagaccatatagttcattatatattttctcggcaaatgcatccgtcattcctgcgatgtaatcgatcaccatgtgttcccaagtccagatcggctgggctttggcttgatccttctcataccgctgcagccagtcggatggaataatggatttggacgtttcaggatccaggaatgcatcccataatcgcttaatcatccactcactgcgcttctgtagccgctgcacacgcaggtcacgaatcatggttacccaggcaaaactcttgagcacactcaccgtacgcagcatgtcgaggtcttcagccccttcacggacaaaggttaccttcttccagtcaccgtcgtcaataacgcccagactgcctacaaaaaagctcacccagtaggctttcacctcacggcgggtacgcgagtaatcatgctcgcagaacggcatcttttcattccagatgcgcaggaacgaagcgaggacctcttctaccttttgcccaatcgcttctcgggtccatccgttccagaacagatcctccagcgttgtaattttatccacaatcagtcgattcacatgcggatcttgcaggaaatgctcatgtacttcaattttgcctgctttgatgccatcctccaagtcatgtgaggagtacgcaatatcgtcgcaaaggtccatcagctgtgcttccagcgtcttcttgcccgccggtacgttccagcgatcacggatctcccgaatatattgccactcatgatgatacatgccttttttgctctctgtcccagggtacggatacttgtttatccctagtaataccgcatcagacagattcagtccatcgatatcttcacgtttctccaagtgcataatgagacggaagttgtgcgcattgccttcaaaatgctcgtatttccgttttaactcggcacggacttcagactcgaccttgggaactttggcgttgcggctttttttcatgattttcttagcctcggtgttgatgaggtcatccagaataccatctaatacttcttcacctttatgtccaaacggcgggtgaccaaaatcatgtgcgattgcagcgcactccaccacttctgaatcaataataaggccggggttgtccgcgcggtcccagtctacctctggaaaacggcgaatcagacttcgggcagcctctcttgcaatctgtgccacctctagggaatgggtcaaacgagtacgataataatcacccgttcctgcgccaaacacctgcgatttgccctgtaaccgacggaaggtcggtgaatgaatgagtctcgaatagtcccgctcatacgctgcacgagatccatccaatttggttaattcaggatattgtctatgttctctcagatcgttccattgcatggggatcactcctagccgactgtctctattttgagtgattatacacaacatctgtggtttcgaaaagtaaaacctgtctgcgattgtcatctcttcttacatcaacttgtgatgaacagtcatcttctcttattataccctgccagactatcatccgtgcatctaaatgacaatgattcatattgaactcacactatcgtgacttatgacaaaaaaaagtgacttatacagtttgcgtggccgttccggtgacggatcgttcttatgatcgctgttgtctccaggttttctgaattccctttactagggaaaaacccggagacaaaggcgaacgcttcgcttcttcagaatcgattccgtccccttcactacttttgcgtccttaaaatacataatggtattcatcatccagctcgctaaaatcgagtgaaaatcaagttcaatttagaaaatatcatcatttgtttcaatgatagtatgcctcccctgcaccctccccgttgtgggtaaaaaacaaaaaccgacaggacggaaatgccctgtcggatgaatatggtggatgcagcgttgcgatttagctactaaacttaatgttcgcagtctactcttgaagctacatgaacttttgcatcaaggatattatcgcacccttgtacgaaggattttcacaccataaccttacagatatcgttggtgaattctactggatcttgaattggcaatccctcgatcagcaaagcctggtggtacaagaggctagtgtagaggttcagtttttcctgatcttgcgcgaaagcgtctttcaacgatttgaatacatcgtgatttacgttgatttccagtactttgtcggcttgtacgttttcgctgttcggcatagctttcaggattttctccatctcaattgtcagctcaccttcggtggacaaacataccgggtggcttctgaggcgtttggaagctttaaccgctttgactttacctaccaattgagcttgcatcgcttcaaacaactctttgttgtcgttgtcctgtgcgtccgtttcttctttgtctgcgctatcttcgatgcccaggtcaccactggagatggatttgaattctttctccttgtagttcgtgatcatcttgattgcaaactcgtcgatgtcatcggtaaagtacaatacttcgtaccctttttcaagaacaccctcgatctgcggcagcttctcaatacggctaatggactcaccagatgcataatagatgtacttctgatcttccggcattctggagacgtattcgtccaggctcacgagtttgctctctttggaagacgtgaacaacagcagatcctgcaatgtatccttgttcacaccataatcgctgtatacaccatatttcaactgacgcccaaacgcttggtagaacttctcgtagttctcacgctcgtccttcaacaggctttgtagttggctcttgattttgttcttaatgttcttcgcgatcaggctaagctgacggtcatgttgcaacatctcacgcgaaatgttcagggacaggtcttccgaatccaccatacctttaacaaatccaaagtaatctggcaacagatccccgcatttatccatgatcaatacaccgttggagtagagttcaaggcctttttcatactctttcgtgtagtagtcaaacggagtgctctccgggataaacaggattgcattatataccacagcgccatctgcgctgatatgcagatgtttgagcggtttgtcaaaaccgtagcgtttttccatatagaagttattgtagtcttcttcggtcaattcgcttttatttttacgccagatcggcaccatgctgttcacggtttgttcttcttggtattcctcgaactcgttctccgtgccctctttcggacgttgacccgttacatccatcttgatcgggtagcgaatgaagtcggagtatttcttgatgatggatctcaggcggtactcttccaaaaattcgtcatacgaatcttcttcggtattttctttgatcgtcaggacgatctctgtacctactgaatctttctcagctggtgtgatcgtgtaaccatccgcgccttcggactcccatttccaagcctcgtcgctgcccagcgttttactcgttacggtcagcttgtccgccaccatgaatgccgagtagaaaccaaccccgaattgtccaatgatgttgtggccgtcttttgcttcattttctttcttgaacgccagggaaccactcttcgcgataacccccagattattctctagctcttcctgcgtcataccaataccggtatctgtcagtgtgagcgtgcggttttctttgtcaatcgtaagcttgatgaagtagtcctctttgttgaaaacgagcgaatcgtcggtaagtgctctgtaatatattttgtcaatggcgtcactggagttggagatcaattctctcaaaaagatttctctttgggtgtagatggagttgatcatcatatccagcaaacgtttggattctgcctggaattcttttttagccatgaatggttggactcctttcaaattgggatatcgaatgatttgattgaaaatataaagtaaatccttgagtttttcatacaaaacttacggatgccagaaaatcatttgaggcttaaaagcttgatcatcagatccaatagattggctaatcttcaaaaatgcatgacgttctgcaatgtagccgttacggttacgaatcgtttttcggatcgctgttatccccatatttctttgattcccttttgaaaagggagaaatccggtgataaaggcgaacgcttcgcttcctccaaatcgatttcgtcccctgcactacttttgcatctgatcagcgactaattttttaggatagagaatatcaatgaagtgatatctcctagacgtggaatgcagcttaaagtctgttgcataccttggcttcgcatgttctactcaggttcaatatctattttcaaaacagaatcattccatatgtaagcttatagtaaaaacatcatctgttagcactctaatgatcggagtgctaaacccttccttttatataacatatgggaaaattgggtgtcaatacgtaggcggttattttaactaaaagatcgaataactctttaacttttgcacatcaccaatcattttaccgtaatcccgcaggtaaaacaaaagccgacccgaaccagagttcgaaccggcatggtcaaagattgtgatgtgtctgttgctgtagtagatagcgttaaaacatatccatctaatgtaccttggagtatcctcggccttactgtgttgagactgatgtatgttgtatgggtactttggtaggtatgttggtactttggtatgttggtatcttggtattgtggttgcttgaatgtcttgagcagcatgacagtcacgcgctaacgaatctcagaggcgttaattagcctttttgggatgacttcataatttaacgaatcgtagacacgctattgcttaatttatgcaaatctatcgagcacattcaaaagtttttaacataataacgcgtgtgaggttcgttagactgggaaattggctggaaatcgtaaaataagggctcccgggttcgttagagatgatgcagaagttagcgttacagctacaaataggagtatggctaaaaattagcacatgcggttagttttagagttagcgatggcgcgtatgctgcgttacagaaaaaattaggtttgcagagctagggttgcaagtcaagattacagtttgagttacagtttgagttcgagcttgggttactagttacggtttgagtttgagtttgagtttgaaaattctactttttggccattttcggatcaagggtgtcacgcaggccgtcgcccattaggttgaagccgagaacggtcaacataatggaaacgccggggaagatcagtgtccacggtgctttttgtataaactgacgggagtctgacagcattttaccccattccgggtcgggtggttgtgcacccatgcctagaaatccgagtgcagcagcttcgatgatcgccgtcccaattccgagtgtaccttgcacgatcagaggagtaagactgttgggcaagatgtggcgaaacaagatccgaccgttgcccgctccaagtgtccttgccgacgtaatgaattcctcctgtctcaagctgagtacccgtgaacgcaccaaccttccgtaggtcgggatattcacgatggcgatggcgagcagtgcattttgtaacgacgggcccaatatcgccacaatggcgatggctagcaatatccccggaaaggcgagcaagatatcaaatagacgcgagataagcatgtccgcccattttccataaaacccggcaatgagaccaagcaacgtacccgcgataatggaaccaatgacggagaaaaagcccacccacaaggaaatacgcgccccatgcagcactctggaaaacacgtcacgccccagatcatcggtaccaaaccaatgctctgccgaaggggactgaagccgatccaccagcacctgttccttgtaatcgtaaggtgcgatgtatggcgcgaggaaggccaatacgataaaaaatacgataataatcaagcccgcaagcgcaagccgatttctccgaaacgttctccacgcttcccgccatggaccggatgtgctcgccgacgcagcgtcaatggatggtccggtattggtcgataatttggccatgcggtgtctcctttcttgaacatgaatataacaaaagatcaacgcgttctattacactcaagcactacgattgcattaccatcttctgatcgctgttatccccagattatattgatccacctatttaaaggtgaaaatccggcgagacatgcgcagctatgcttccgatgtagctttcttttagaaagtttttagcttcgcttctgcagattggttcttgatggagccctatttataactaatccgtggatcaaacacagcgtaaagcaagtccacaatcaagttgatcaccacgaaaaagaacgccacgatcagaatgccactctggatcaccggatagtcccgcgaactaattgcttcatatatataacgtcccacgccaggccaagcaaagatcgtctcggtcaacaccgcacccccgagcaacgatccggtctggatgccgataaccgtaagcacgggaataaacgcatttttgagcgcatgtccatatacgacaaaaaacggacccagtcccttcgcctttgcagtacgaatgtaatcggaactcatcacttccagcatgctggaacgggtcatccgagcaataacagccatcgggatcgtgcccagtgcaacacttggcagaatcagatgtttcgttacggtccacaactgattccattgtccagcaatcatcgtatccagcacgtacaagcccgtaatggcttccaccggatcacgtgcattcatgcgtccaatggacggcagccactgtaacttgttcgcaaacagccattgttccatcagaccgagccagaagattggcatcgatacacccaccaaagcaatgaccatacagcaataatcaaaccaggagttgtgcttccatgcactgacaatcccggcattcaccccaataatgacagcaaacaacatacttgccatcgttaattcaagggttgctgtcagataaggcacaatttcctgggcaataggcaccttggtgcggatggatgttccaaggtcacctttgagcaaatcgcccaagtaggcgaaatattgctggaaccaaggtttatccagaccgagctggtcacggagggcctgcttggattgttcggttgccttttgcccaagtatggtctcggccgggtcacccggaatcgcgtggatgatggaaaagacaatcagggtcatgcccagcagtacgggcagcaacacaagcacacgtttgacaatatagctgttcaatcctgttcacctgccttcgacatatcatgcaaaaataaaaagcgccggcagacacgcatgctttggatagttacgtccggatgtgggttctgccaagcattgcgtctcaccagcgctttgaaaaagaattaaaacgtaatcactccgaactgtagtgccatcttcagatcgcagttatcctgaaattgataagttcagcttacagcttactcgaaataagcaccggcataggattcggtgcccagtggagaagggacgaaacctttcaggttggctttacccgccagaattggcgtcgtgtgtaccagaggaatccatggtgcgtcttccttgattatcgcctgcgcttgtttgtacagttcagcacgcttgtcctgatcggtttctttctgtgcacccgtcagcaacacatgcaactcttcgtttacataataactgcggttgttgcttggaatggcatctttatccagcagtgtatacaggaagttatctgggtcaccattgtcacctgtccatccgagcatgtaaatgtcgtccttctccccggcctttgtatcttcgagatacgttgcccactccggtgattcgatggtgacggtcactccgattttctcaaaatcggcctggatcgcttccgcaaccttcttgccatcaggcatatacgggcgggataccggcatcgcatagaaggttatcggatcaggcaacccgtcagggaagcctgcttcggccagtagagcttttgctttttccagatcatatgggtaatcctcaatggtatcgttgtatccccacagcgttggcggcatagggttgacagcaggctcagcttgtccagcaaagaatgcatcaatcagggcctgcttgttcaccgcatggttgagggcttgtctgactttgacattatcaaatggtttcttcttgaagttaaagccgatatacgccacgttgaacggtggacgctcgatcttctgcaactcgctattgccttcaaggatggacagatcgtctgggttcaggtcttccatgacatcaatctcgccgttttgcagggcattgaagcgagcggtattatccggaatggaacgcacgattactttgttcagctttggcagtccttctttccagtaatccgcgtttttctccagggtgatggagtcgttacgcttccactctttgaatacaaatgggccggtgcccacaggctcgctcttaaagttttcttttttctcctgaatcgcggttgggctggcaatgccaaatggcgtcatcgcgatattttgcaggaaaggcgcttgtggttggttcaatgtgaactccaccgtagtttcgtccgtcgccttcacttccttgatcacacgtccatcctctggaccaaacatggaatcgtaataatcgaaggaatctccctcgaatttatattcactcgccggatcaccccagcggttgaagttgaacacaacagcctctgcgttgaggtccgttccatcatggaatttcacaccggacttcagcttaaacacatacttgagcccatccgccgaaatctcccagctctctgctaatccaggaacgacctctgttccgccttccttgtagtccagcaatgaatcaaacacctgatgcccaatcttcagcgactccccatctgttacaatcgccgggtcgagtgctacggaatccccaccacggcccataatcatcgtatcctgtgctaccgtttcggttggagggtcggttccttccgccggagcaggcgtattctctccactctcgttactggagcaaccggacaacaccaatacggtactcaaggccatcgttagaacaccggacatccatttttttctcattcgcatacgtacaacacccttccctgtctcataatgtgtgtgatgctggtatgaaagatctccaatgttggcaatcggtttggtgctatgtatcatataaaaggctttagatgcctgcgatacctgaattaaagttctgggaaaagtacggcatggatgaaatgtaaaaacagcatgggacacgtatggaatacaggtaaatttcagatcgtgcacatggattgaggacgtcgtttgattacttttatagaaaaagaaaaaggttctacaacgtatcttgtgagatgaatctatgaaattgaatgaaattgttgcgttttatttgaacttaggtcaataagcaacagtgagtgggtatgaactggtaagagcaggtttaagttggtagattaaaaatactgatgggcatatggatactacgctgctggctacgcaataaagtctgttccttgagcgtgtcgtgttgagcatggagtgtggagaccggattaggtatcgttatcgttcgttagcaatacggatgaaagaaactcaacataggctaggttgtttgatgaatcgtgatgttgttaaatcggtggctttctcttgcagattggatgtgtaattggatgtgtaaaatgtatgaacgagtcatcttgagatgttggattgtacaacagggagacattacaataacttcatgtgttatggttttgtcatgatgaggaggattgtgtaaataaactgtggtgaaaaacaatttcgtgtaacttactttacatcacattaatcaattagacaagagatttacagacataagtcttcaactttattatatgcgttaatatcacttacacaaaacacaaaaaaggaacacggttcgacaaaaagcgtctcgtgttccttctccactccatccacatttatataaaatcaacattctaatttgctaaggtcagctcactttttaaacaaacctctgcgatgcatcacggtaataaaacggtaaaaatcataactcgccccattatcgatgctgaacaatggatttttggtgtcatatgccagtgctgcatccacagctgcctttgcccatactggaacttccatttgctgacgcgcctgcagtttgtcgacctgggatttgagcgcattaaacgctgctttctcttcggctgtcatcggttcgccccctttcggtggttcggttggtggattcggatgacttggattcgttggattggagggctccggtggttttggagttactgctgcgtatcttgctctgagctgtgccgctgttccctcgaattcattcatatccacgttgccactaataccattcaccttgcctgaatccgtatactgccagaacgtccaacgcttccatgccggctggtcttccggtacacgggtgttgctgtaacgtgcgatccacagatcgtatgagctgagtgatgtgtcaaaattcccggcaaatgaattgcctgtgtatatgatcggttttacacctgtcagacgttgtaattcggttaaaaaagctttagcaactgtattcatctgcgctttgctcaggttgccagggttgttctcgtagtccatgacgggtggcagttgtagcgccttggcgcctccaactttgttaagtgtattggcataatgagccgcttctgccttggcaccatcggtcgatgtcgcacggaagaaatggtacgttccaaccagcatgcccgccgccagtgcacctgttacatttttctgataatttggatcggtatatgtctgcccctctgttgccttgatgaatacaaatgtcatgccacttgccttcaccttggcccagtcaatattgccctggtatcgggagacgtcaatgccctgtgtgttgcccgaacttctcgtttgcatgtttctcacaccctttatgcggcaaattgccgtttgtatatagttaatgccaggaggcttggcattgcttgtgtgcgtgtcccttgttgatggtaaaaggtactttaagttggttatctaccaacccttttaggaatacgtaccaagtcggtacatgaccgttccagatccggatcgttcttccgatcgctgttgtctccaaatttttatgctccattatttaaaggttaaaatttagagacaaaggcgaccgctaccgcttcttcagaatcgattccgtagctttcactacttgtaacaaatggtacatacttttgaatcggtagtgccctatcccttgccacaaggcgtattggaatgaatgctgaatccttacttcgtatcgtctctaatctgttgatccacgtcctcatgatctgacggtgcaatagattctctggaatgaggagtgtagctaccgggaatcccaccgtcccctcccttgcctttgagcacttcaatggcctgccggatcgcaggcggaatgggtgctcccagtttgcccccattctcaataatagataacagctcattcgcgatataaaaaaaggcgaccgtatccctgaacaaatgtccgtctcccagaacaccgtccaccagatgagccaccgataccattgcaaatataaatacctttcgcgcgatgccgaacatcccgacattgctttcgagcttgccactcgcccccgccgctgcgatacccgttaggtagtcgaggatgacgaatacgagtagtaccccgagcacgcctgaccaaccaccgaagaagtaggttgctgagctgcttagcagagcgataaaagacttccatatggtttcccatttttccatggtttcacctcctaaaaaggtttgcgagctttcgttcacttccttcacttcctaaaaaaatcacttttgaacatgctacgtccctcaaattctattggtgcagtaccacaacacttgatttatttcacacaagtataatcttccttgtgatatagagcacttaccccactcgaccagttcgcaccttccagtaatcctacctttatgttcatagtgtttagttatccgttttcccgccatgtaccactgcaataatactcgtgataatcattaaaatttgtgcgatcgcaatgagtgtacgtttataaccgatacttgtccacaacgtcatacccttcgctattgctcccctttggtatacagctttgtaagggttacaccatgtcccctactactcattttaatactctctatcttatcattaagagttggcttaccctgaaacaatggaggtcaatgtaactttatagtacacctccctagattgagcccatgtattatcgtacacagcgtatacaagtttaatggggccttgtgtattgaaattactaggggcgaaaggcccctgggtataataagcaccatcggttgataccctcaaataagtagaaatagatcgggctactaaatcaatttggcaaaataaaacactcataataaaataaagacctgtgttgttgccatgcggagtgtgtatgggccataaaacaccctgattatcgcgaagggaaaacgcaactgaaatagcaccatagttgcattgagatagcatgttacctgccgaattagtaaaaaggctaataacttttgttcctgctgcaaaagttgctatatctgaccctacttgtcccgaaaaaccagcgggtacgtttatataattaccgcgtacatctggcgaaaactttgcatattgcccttgttctattgcgtttatttttgccatcaacgttacccatgtgtcacttgtggatgcattgccacccttggcgttaatggcacctacaatgccgtttttagcatcaacgccagattgaaaaagcgcaaggtcgtcagcttcagcggtgtacggtacatccaccgcacccgctgaaaacttaatccttgaaatagctttaacactcccgggaaccccggatgctccacccgctacaaccagacgaagttttaccgatgttacaccggaaggaatagttactgttttcgacttccgatgccaattggaattagcgtcggcgacaagcgaattgattgttatatcatcactggcatttttaacttcaataagcaaaatgcccgttgtcattcctaatgtataaaacattgcttgtaagttgtatgtcccagcgatgacattggttgggttagaatcaagaactgcataactgttagccgccacagctcctgttacttgaaaatacttcagcgttctaaagttagtaccagcggtcacagaccatggagctgacccatagtcactccacccgtaaagccctaagtttgcggacgaattctgaacaagattggacgaatccaagctgataattggcgctaccgccgcattagcttttgttgtcgcatctgtagacgctgcattgatcgccgccaccctcgcatcccttacggccttctccgtcgccgccaccgcctcagacgtaccatccgtcttactagacaactggaccttccccttctgcgtcaaagacgcatcgggaatatccatttgactcaccgcttcacgaagcgtatccaaatccacttgcgtcgcaacaccagcatcaatcttttcaaaaattccattaatactctcccgggtcacattctcgttccccaaaggtagaggtaacttcaatcgatccgtttcttgtggcattacgcccacacctccagttcattccacgtcaaggacgcggcatccagttcatcccacgttttttgtcgcttgtccagatcgtcccagatcagatagcgatactcatattccacggccatatgggccggtttcaattcttcaatcgctcgtttgagatcatcgatattgggcgggatgcccatcgtatccacaaagctcaccgtaaaactccacgcttccggctgaaaagttacatccaccttgcccccggcataagcctcagccacattcgcaaccagcctgcccgagaactttcctgccccacgcagcttcgattccaccaccgcgcgccgctggtccacaggtttgagacgatccgtctcaatgccaagctcctgctcccagaagtccagcccccacgtcgccgtacggacaaaaaactgctctaacgtctcatccaacgcctggtacagcatatccatctcggtgcctttggcctgcatatcggcctgcatgacacgcgaagtctcgtaataccttggcaaatacgagaacagttcccgccctttctcactcgtcagtccaacatctacagtagaaggagcactcatgccctgtcccctcccttccttgcatatcatcatggagcgtctcgctcaccagttccaatccggatccgcgtacttctcccgatcttcttaagtctccgcactccccaattacatcctgatcaaccgtctgcccaacactactcatgcacatccaccgtccccagcacggccacctgactcgcagtcatctcaatattctggtcactcacaccattcacggtaagctccgaatagtcgataataggcggaatgtccagcaggatcgcggcaatgcgagtgtaacgaacgagtggatcggcaaaagccaactgtttcagatacgcggtcaccccgcgttcgatcaatgctcgtacatcggctaacgttgcatcacttgccaacgtcagcttcacctgaatattcatcggcacttccacggctggcatcacggacacgaccggacctgctggtgcaacgccttcaccctgtccatcctgcgttgggtcaacatacttctgcacggcccccaccaggtcggttcccgcagcacgtttttccgtgtccaacagatacaatcccaccgtgcctggcccctgccataacggaataacccgcgttgcaccaacacctggcacttcactggcccattgcacatattgcgacttgttgccgcttgtcccttggttgcggactttggcataaaagcgttccagcaacgccgtatctgcctcaatatctgcaccgcctttgatcacctcaacgttcgtgacagaggtcacgccacttacaggtgtagacagcacagttaccgtgccagcaggcacattgctatcttttccggcaacaagcgcacgcacgccaaccaccccggatccctctgcatccagttccaaacgtcccaccgtctcatattcgagcgaagcttcagcagacacttcatccgcgagcgtagccacgacagttcccgcaggaaccactttccccggcgtacccgtaaacctcaccgcaccttgtgccgccaccgcagcccgccgcgtaatgccatgctctcctgcccgcaggtccagctcttccgaacgaaaattcggatcactactcgcagccgtactcgcaaacccgcgccgcagtaattcctgcgcccacaacgccgcctcagacagcataaacgcaaccggagcctccgcatcccacaggaacgatccttccgacttatccagatccgcgggcagacgatccagcatacgctgcataatctgttcctccgtctggtcctccaaataacgcggaatctcagccatcccgtcagatcacctcactttccagaataaacatctcttcctgcacactcgccacccgacacgagaacatgcactgctcccgattccaatcaaatgtaaactggtctaccgaatccgtccgtggatcagccagcaacgtctcagtcaccatccgggtaatttcactttccatcacaccccggctgtcaccctgcccaaccagatcttccagctccgaaccatagttccgggagtaaatcacatgtctgtaccgcggcgttttcacggccttaatgcaccattgcacccaggcttcatgtgcatccgccgaggctactttgccacttggggtcagcacaaaatcccctgcatcgtaatcaaatcgccagctccgcccaaagcgcacctcttccgaagctgcccccgacagatcctcctcatctccccaaatcacacccgtttccggaaacaaactaggcatgcgcactcaccaccttacacagcaccacaatgtcgttaccgccattcacccgcatcgccagtacgcgatctcccgcttttaatcccttaccaagagacaacaccgtttcttccacttcctcttcttgcaaaagaaaccgtcccgtgcccgtcgttccgccgtttgccacgtcaggtataccggaaatcgcgccagcagcctcgcgctccggtagtccaagcgtgcccggcagctcggccacgagataatcctgcaattcgtgcttgaaatcatccagcttcacgccggatgaggtcatcgtccccaataccgcgcccagcccgctcacagcctgacgagaatgtgtactcatcgcaccacgcatgacttcggcaaaatgcccatacggatcatctttattcaaggtaatacctccttttcaccagctcagccgtccccagctctaacgtcatcgttccaggtccggctgacaaatcacggctgaccgacatgacgatcagcttcagtccttttaacaacactgcgtccccggcgcggatcgtattcacatccggtgcggatattgtaaaggtctcctgaatacccgtcagatgacttttcgccagttttttcgcggcggttgtcgatttcacctgatcgtcctctaccagcttttgcaatgtgcccagttcttccacaccattttgctcaattgcaagcactttggaaggaacttctttgccactcggtgactccgacgctgccatgactttaactttggtaaccgccccttcgagcgtacgcatctgggtcagatcaatcagtcgatccagctcatacacctttgcattacttccgacctggaagagctgcagcccgccgggtgtcatccgcggatgatacatgtccccgccagacttcgccgtttctttcagatcagcaaacatcatcgaaaagatcgtctgtgaccgatacacggcttttcccagctttgtcttggtatccgggagcgtggcgtatggaatcttccactctttggcgtaggttttaagtcgctgtgtggcggtctgatccttcggcagcaggaactcgtcctccgatttttccagataaatcatccggtcgtacaccgtgagagacagccgcttggtgccgctgttcgagctttccacctcccaaatgaccgcaggatgcagcaaatgaaccatggatttttcgccaaaaggaaccccgttaatccgcaccgccatgccgggtgagatcgaaggcagacccgaagacgcagacaccgccaaacggatgttggcctgataggcaatctggtcgagcgagtccttcagcgtaattgtctccaccagcttggtgatgtcatatttattgtcgacaatgaccttgtaggtcatggcatcaccagcttttgcccgggcttgatccggtttggatcactcccgatgacctttgcgttgagcttgtagatctcgttccatttggaactgctacccagctcaagctttgctattttggacagggagtcgccagatttgacggtgtaggtcttgctactctttttcaaatcggtacgagaacctgacttgcccccggatgccgcagaaccgaccttctccaccttggaatcacgccatgtgcgcagggtaaggtcgaaataaatatctcccgtctccccgccgcgaaagctcgaattaagcgaaacaagaaatacaggaacgttcactccggtttcggagatgatgaaacgcagtggctttttggagatgagaaaagtgttcaacacattcatcgccacgcgtggatccagaaaatatttttcatccatgcaataggacggatcatatcgtttcggaaaaaaagaagagaaggtgatctccttcaccttctccccttgtgcaaaatcaaactcgccatgctctaacatattgaccgtttcatgtcccttagatctggaaatattaacttcttcagggtttaccggaaattgaaatggagtattgccatccttcaacgtaaatgacattttgttaggaccaactttatcttcaagtacagacatatctgcggcctcctttctgcttaggccataattgttttgcgattttgcatcgcgcggcggaactcatcagagatacgttgccccacctgatgagaaactgcgtcataatcaatagcgttctcccgaacggtcacttgtaccgtacccggtgcaatattcacagcaatctggtttgtcgtttccgttttgaaatccttaaggtaacctgccagactgctcatctgttcttcggaaatacgcactgtgagcggcgaagctttctcattgggttgacccacgttattcattgctaccgcttgggattgcatcacacttgttcccataagacccgcagccgtcggtgaaccaaatcgattgttcatgtaggcttctggaccggtgatcgatagaactgccggcctgtatggaggcggcatctgaggtgctatcggtggagggggtggtgtctgcgttgctacaggtgttgagggtgacgttatgaccgctgcggctggggcggtctgctcttcctttttagaaccgaaaccaaaaaaacctgcaaccccattgaacaaattcgtcgttttctccgccacgtaactcgctccctcagaagcaaattttgctacttttgagatgtcttccgcgttgttttttaggaatccacctaccttgtcacccagccaaccgcctgccttttcacccagccaaccgcctattgaaccgcccagcatgttcccaaccaccggaattggaattacactgccaagtacggtaccaatagctgttcctactgcattaccagcaaccgaacccaccgcacgagcacgatcctcaggtggagcgcttgcaagttctttaatattgttatacatacggagtggtgcgaacaattttcccgctcctttaacgaggttgccaccaagcttgcttatgatgccagacccaccactgcctcctgccccacttccgcttccacctccaccaaagagaccttttacatcgccccacaatccatcgaatccaccgatcaaatcggaccctgcggacgagaaatcattcacaaactttgccccacgttttgtaaccttgaacgcctttttaaatttattccccggtgtggcaggtgttgtgatttctttccatagcttcttcccactatttcttgcatcaaagactttccccacaccagatgagattgatttcccacgatcaaacatacctttcatcttctgcaaaaaagttttaggtttcgcttcggccgctggtgccgctccaatattgatagagtctagcttggtactcagcatattaatagattgggtatttgtattcaaagcatcgatcagtggctgtgaattcacattaacggatacatctgaaatctggtggctgactttgagctgcacactagctgtagcattcaacatcttagatcggatttgcttcatttttctcaacaaaccatttaatgccggagtagcacggtcaaccagatcaaccgtcggtgtaatacgcagcctgctgattcgcacagccatactatatatactttccaacctgcgcccagtcgttctcagctcattgtttaccttgatcagactctgatatcgaactctgcccagacgttccgttgagcgttggatctgatccaagtatcgaagggttgtccgcatttccgtattggatttagacaaacctacaatcatttctgccattttttcacctcctgccctatattgttagcgattcatttgcgaggttatcgctgacatttcctcttccgagaacgcaattaacagcgagcgctccccgcgtggcaaagaccagaactctccgggccggagatgatgacgcacccacatgtgatacaggaacgtggtcatcccgccggagtgaatcagttttttaggtcttcaatctccacaccaaagccggacagctccagcactttatcacctacggcatccaattcacccgccagcaacatacgacgtactgcctgttcgccaccggacaacttcatgcggcctgtaatgcgtgtgtcaccccagccggacaattcaaggctccggactttcaatttcaccgttgcttcagagatgagcagcgcgttaaacgtttcggtatccaccttttcctcggtgcgccctttggtcgtttttcgaatcgtacagcgttcgcgaatgtgatccactttggaggacgtcagtccacgcaaggtcaacagcagatccagacgctgaatgcgcacattctcctctggcaaacgttctgctgcttcaaacaactgatccaaaatctgttcttcggacatattttcattcatactcatcgggcgttatctccttcttatttcacaaatgggttcatctatgccatcttccaggcctgtagagacaacaaagagaccgagatcatctcggcccgcattggtgtccatattaatatgaagtaactatgcaaccacgctggagcaaactagcccaatcacacgtgcctattccaatctttagttcgccacaatcggattcagcaattcaaatccttcaaacgtaaagcctgtttcctccggtacttcctcacccgctgtccagttggcaagttggattttgtccaccatgcaacctttcagcaaaacactctcatgtccatacgattcagggtcgttcagcttcgaaataatctcgaatttggtgaagccgcgctggatcatatctgaagtgactttgtaaccagtcatcgtacctgttccttttttcgcgccatttttgtgcactttccagtcgttaccgactaggttcagctcacgcttttcaatctccacactcgcttccaacttgttaatgtttgtctgccacacaccatcgatatgcaactgaccatgggtaccgagaattactcttgacgcatccaacatatattttcctccttgggttcgttgaactaataaatattacacggtataactccgcagtcagaacaatcttccgatcgctgttatccccagatttttttgattccttttcaaaaagggaaaatccggtgataaaggcgagcgcttcgcttcttcagattttttctgccctctccgttatcgtgtaaaccatcagttcaacatatagtaattattctagaaaccttattgtacgtaaaatgtaccgaacaactgctccatcacatccgtcagcttcacattccattgcaggaatacctgatccgcttccggtttgagaactggtgccgtgccataatacgctgggtcaagaatgacatcataaccgtcagcttcaatcacattgctctgtgcgagcagcgacaaataggccttcatggcactaatcagtgcttgacgaccctcttcggtattgtttactttaccgatatacgtatcttccgcggaacgctgcaaatccgtgttgatcgcatccaacacacgaatggaacggatttttttccacgcattattctgtccagcggctggcgttaccagtgtgtttacaccgcgaagtgctttcacctgacgtccatcatggaagaaaataaacacaccattctgtaccgcctgctcctgttctgcacgcgtccagcgacgtgtcacatcatcgaacggagtagctgcataggttgtggattggttcagacgttgtccggcgatcagtcctgcaacataggcggacgtttccgccgagctgtagaatgcatctccaaggcgtacacctgtaccgacattaatcacaccttcatggttcagcgcaagcgaacgtgctgccgctttttgtgctgctgtagcagaagtgtcatccgctgcggaaccgccaaatacagccaccaccggtttaccttcactacgcacacgtttcacccatgccgcaaaactcgcaagcagaggtgcatcagccgcctgatccaaagccaagacgtcgaattgttccccttccagcgcaccttgcacagcaatatactctgcattggtcaggtcatcgttgccacttacgccgcctttgaatgccgcacccgcaacggtagcaaccacgccagtaccatcgccaatcgcctgcgccgtcacccagacattttgttcatccgcgttaatctcttttgccagagaagctgctgtaatattcgctgtcaggagcgcatacaacatccggttaccttcaaaaagacgaacttcatgcttcgtattatcaatcacacctggctggatggtgacgtagaatccatttgcacgatctcccggatacttcgcatccagttgcagcacattggcatcactgctgtccttcaaagtaagcgtggctactttggccgcagcacttgctacccgataagcgagcaacttcttcggcccacccaacagggcgagcttcaaggacgtataagccgtgccgttgtccagcacattcgccgcataaatacgttcaatcgccgcttcgctccctacctcaacaaaagttcctaccggtccccagttggccttaattggcacaacgaccgttccccgtgtacctgcctgaatggctgaggatgctgccgcctgaaaattcatatataatcccggaaggaccggacgattcgtttgctcccaagttccacctgccattatcccttcaccttcgctttcataaattggttaattcgttcctgcgtttcttcaatggaaaacgtctcttgcgccgcttcgtacagcgcaccgtacagcacctctgccttaacggcaaagagggcttctgcatgattcatcagttctgcccgtgtataccgcggggctgtctgtttgctttttttcactgagcttgccatggccatctcacctcatttgttggactactaatttcgtgaatcgttgatctttaagcgtaacctatgaatttttgatcctatgcacctatgaatttgaagctataatgttgaagctacatctatcatctcaaagctataatctggaaccacccttatatagaaggttcctctcgactaaacgtttactccatacctttgctatggtgaatctcacgaatcaaaggtacattcgtacccggacgacgaatccgctgttgcaacgtcaggcgaatctgtccgttcagatacgcatcggtctgcagatctgccgtaacctcatccaccgtcacataccgtgtgttacttttgtgctcttcgccacccgtttcagttacggcaagacgagcttggaccgcaagttgctctaccaaccgagtaacggtataccgggttagcaccgaatgatcggtgagcacatgcccaatccactgttgtcgaacctccaatgctgaagtgcccgccacagacgtgctgcatccagccaatcgccataacacagacggcatctcatatcctccaggccagatatccccatataccgaccagcccgaaccaagttccgactgtgtccagtcttgaagcgcagctagccacgcgtcacctgtttcagcgaggacagctcccgagtcttcgggaacatacactccgaaccgcagactgcgtgaaagcattccagaccctacatccacccggtcactatctgaagaacccagatagatacaagtgaaggactcaccttcttcatccaccagccttacttgatgcagcccttcgattagatcagctgaccaagcttctaccttttcagcgccaccatcttccggacgagcgtaaggtgagattttaattatccttcgatatcccgcccaagcagacttcggcacttcttcggcaaacgcaacgactgcacaaggcccggccaacacttcgcctgacgcaggtgcatccagcacacgaccgtcccaatctggaacaagaatagtgagcttctgtttcagcgttttttttatgaacttactcattttaccggtgctcattacagtgctaatttcatttctcatagacacattcatttcgccccctttggctgcaagtttgagatctgcccacaccgtgcagcgacaatgcagcagcagtagactcccccttttaaatcagagtcgtattccgaccgaaccagtaccgggactacattcaccgcatcaaaaagaccggccacctggccggtctgtacattagcgtatgtgctttcggtgcgtcccttgctactaatccgataatacaatcttacaccctttcattcctagcgcggatggtgttccgtacgacttcggtgcgattaagggtgtcgttcgggtggaaaaaagacgacataacgcgccctacactttcaaaccttagttcagcgtaacttgcgggttcaacgtaatctcaaacgcacggccccagataaaatcaggattcgcatattcaagcagtgcactgccatacgtcgcgtaagacaaatcaccatcacagatctgcttgatcgccacattgcctgtctggaaagctgtcttatttgcaagtgccgtggtatacatctgcatcagatcacggagtaaagtttgcaaatgggcatagtcttcctctgagttgaacagcagcatattttgatccgaaagggtagccacgttggtatacagcgcatgggctcgggaatacgtgcggatgtccgcaatcgctaccgctttgtagtaataatccttcaggaaacgcttaaacaacagcgagccatgcgcattcatcgcatctcgcaatttatgctcatgcttctctgttgtaatcaacgcgtacctcgactgtcccatgcctacagcaataccgatcttgttacctggcgtattccaggcactataacccagcacccgtccggtatatgggctgtttagcaacgcttcagcaacatcgacattggctggtcctttacccacaaaatcaatcaataccgaaggcagaccttgctccccattcagggtcaattgctccaacgctgcttgcacctgatccagagcggtaatcgcaataatctcaatgtcgatgcttgtgttctctccggaattacccgggtgacccttggtcatacgatccaactcggaagccatgtcaaatgggacaacttgatcggctgctacagccactagctgttcattttccaagccagcacccgcattcgtcaccacctccggttcaggatatgccgagtcggccacaagcacaccacctacaatatccacatgacgaaccacattctcatgtacatccatgtattcatacgtgttaatgatggtattgccgtgaggaccaaaatatttcactgcgtaacgtgtcctcgccccgcctcggaacaactggttagccatgcgagcgaccaaagcgtgccccagaccatctgcatccggcaagatgatagcacgatctggattttgtccattcgcgccacccagccattcattgatccgggcttctacgtatttgatttcattgatctgaacaccctgcgtattggcatcgtcgacgccaactgcgaggaaatcaatataacctgtgcgagccagctgatccagaatgtatagattcgttttgaatttatgctgtcttgtgttgtaatattgttctttatcaaaataggtcgttgtcccatactccaccccatccggggacaggttataaccttgaataatatcttcaaactcggtgtacgtctggcgtggctgctgcatcaacgcacgggattcattatatgcatcgagcgccaagccatctgcaaacgaggttgtagccagacgcataatggtatccattacaaatacgggtttgcgcggatatttctgcttgatcacacgaatcacatacagcaaacgagtggtttcctcatcgtactcaggataggcgcctcctccatcttcgcggagctgacgactaccaatcagaccgccataggcgagcatatcggaagagataatgaatccgtcgaccttggcagcatgtttcagaataaagtcgtgaattggggacggtttgccataaaccggcgtggaggtgccgagcagcgttgtgccatctacggttttctccgagtccagacgattcttaagatcactcaggttcggtgtaacgatatggataccggctgctttcccttgcacaatcacatcatccagattcgctggacgatcatccagtggaacatacaatactgttttcatatcacgtagcctcctgttatctatataagttgaactacagtttatttacacttgccacttcgatgacagaacaaccttccgatcgctgttatccccggattttcttgatccacttatataaaggtagaaatccgtggataaaggcgcacgctccgcttcttcaggttatttctgtcctcttcgttctcgtgtaaatcgttagttcaacttatatatctagtctttaatacccgatcagggcaaggaggcaatcaccgaattaaaaaaccggccccatggccggtctgtactttagcgtatgagctgtcggtgtgtcctccttgctgctaatccgataataccatcttaccgcctttgcccactcgtgctgatgataatcgggatgaaatacgcatgaatgtagttggctctgcggcggttaatcgtcggttttaatctgaataaaactataacatccataaaacaagcacctgccagttttggcaagtgctcttcatttttgttccatatcgttggttccatctcacgcgatgatataacgaaagttctcccatgtttccggtacaggttccccgttcttggcatgatgatagaagctgaacgggaatttgaacacatgacctccataccagtcacgggaacgtctatcggtgagccagtactccagttcatggggcagtgctacggaacgttccgcccgcgatagtggcagcaagtctacaggtgattgcaatgtcggcatctcctgttcgctgttcacatctcggcttaaacgtagcgccttcaccatagtaaggaaaggtggaatgcctttatggaataatgcaggataacccaattcatataatatgttaagcgcatgtccgtaggtcagcatatggccgatcagatcatgatgtgcttccgcgtgatagatagtctggaacgcaccaagctcatccagaatcaggcgtgacaactgcgttggatcttcaatctcagggaaaccatcgctcttttccggcttcagactacgaatttctttcacggtcgtattcatccaggatcttcctgggatagttcgatcgaatgaatcgatcagttcaaccagccgaccaatatcctccgcagtaccccatccatccagttcgcgaatggccttcagactgattgccccgtagatggcctggtgtccaacccagtgcagctctccaatcgttcgatccaatgcgtccgtaatacgcgtttcggcatcttccctgggcatcatttcaccaatcggagaggtctgaccagggctgattccatgctggcgaagcatggcttttgcttcggccgtaacactgccggcggcaagggcagtgagacgattttcccgtaaccaaaaatatgccgcaatcgcacccgccccataatgggcgtgccacagatctcctgtacgttcccgactggaaacgataatcgctagtccatcttccaacaaacgtcgatccaagcttgccaccacccttcattatatgtaaacccatcagagaaactatataagttgaactaagatctgtcctctccgttatcgtgtaaatttagttcaacttatatatcctaattaataaataaagcgtttacttctataacatgatggaaatgctccacatatgcccgttttgccccggaatgcaaagtttagccaattcgaagcttgcccacgccaaggatggatacttccaacggatagatctgtgctttttgcttggagaaaaaccatgtccgatccttcctcaccacaataaacagaccgtgcacatctcctacaggagcaaaggtatcactaacctcaccccatcgcgtgagtccaatctgctgaagctcattcaccttagacagaacatcctccgtcaccagtccaacttcacacacctgtaatatatcttgagtcgagaagtcatggtcactctcgttctgaatacgatgatgagcaatcagctcaataatattgcctgccggatcttcaaaatagagagaatgagagtcccaattagtagagtacgtttcatcctgattttcctccctgcttaaaacaacacgtgatgcagcccacttcttcgcttgcttgaaccgattcgttggaatcaaccaggccacatgataaaagggctcatgatctgtttcacacggtttgaaaatcatctttgtccctccaacttgcaggttgaaggcctgatccgtcgcagtggatacctccattcccaacgtatcacgataaaaatgcttgaggtcctccagccgtgttgtatataactgtaattcttcgatcatcatatggccttctcctgcaactcctcccactgactccatggcaccatgccaagctcaggcttcgcttcatccgggagcatggcgatgaattcaagcgaatgaccatccggatctttaaaatacacagataccgcaggcatccagccaaagacgtacagttcaccgatatcatcattcaggaagttctgtgtcttgatccctttgttctccaagtgagccaccgcatgtttcatatcctccagagatacatgaaaagcaaagtgctgacgtttcacctcggaaggttccttttgccacaatcccagcatggcattgccttttccaccaatccagtagaaggagttcccacgttctttctgcccgtaggcatgaggtaaacccaggaccgtttcatagaaatgatgggatctctccagatccgtcacgtttaaatgtgtttcaaatatgcctgtaatcataatgctcaacctcttttccttttccgatttttcatcttccttggttctcaactcatggtagaattccgcgcattcgttaacgtctgggccagatttaaaaacgatccaatgacccgctgcacccggtcctctatatcctgactgccttcgtactcttcatatccgtcaaatgtcgcttcgaatcgtctgcgctgcgcaccaccaatggatatccactcctgggcattgatgccatgcagattgcgaacaatcgcttgcagttgtaaaagcgaacttacccccaccgctccgccagaggagctgatggacaggacgggcttgccgctgaaatgagcctgactcaggtgatccagtgcatttttgagcacaccacttatactgccgtgatactcaggtgtagacaggatgatcgcatcagccgcgagcatacgtgtattcaggtctgccagatgttcatgatccgcttgtttttcatctggcgcgtagaatggaagtggtgtctgatacagatcaaacaggcttgcctgatgtccctgaccgcgaataatctccacagcatactctcccagacgtgtactggttgcattgttccgattgcttcctgccaaaataacaatattcattcatgtcactctccttggtttttttatgtttcaaactctaacgttccttcaaccgatccgtctttggctatccttatcttacctttcttttgcatccaaatcgtcagcagatagacttaacttgaaataccaaaaaactcaacctttaggttgagtttatacgacttaagtatgaacatatgtcggaattggtcacacgacccagccatttcttacggcatgaagagccgcttgtgtccgatccgccagacccagtttgtcgagcagatgactgacatgtgttttgaccgttttttcggtgatgaccaattgaactgcaatttccttgttgctcaatccttgagcaatcagccccaatacctcttgttcacggcgagtaagcatatccggaccaccaagggatgtttcatttgattttccaacctgctttggctcctgatgttgactgtctgctgactgatctgtcggtatatgctgtggttgctgttcatttatagaccaatcggatgaagccatcacatgcatcaattgacctgctgcggcgggatgcaattctacctgacctgcatgcacattgcgaatggccacagccagatcctccggttcaatatccttgagtagatatcctttcacccctgcacgcacagcaggaacgacatgatcctgatccgaaaacgatgtgagtacaataattctcgttgctggcattaatgcacgcaaccgtctggctgtttcaattccatccatgaccggcatatgcagatccattaataccacgtcaggttttaacgcttccgcctgcgccagtgcttcctgcccgttcgatgcttctccaacaaccttcatatcttgctgtgtggtcaaaaaaacgtgcaaccctcgtctcaccatcgcatgatcatctgcgagcaaaatcgtaatcggcatctcttcttccccctgactttatacagcttcgaacggaagtggaatgactgccgttactgtcgttccctttcgggaagaactaactatttctaacctgcccccaagtgattcagcacgttccttcataatggacagaccaagtgaacttccagacgacgattttggcttgttcgctccgccttttcccttgtctgtgacggtgagcatcgcttcatgatcacttagcttgagggtgacctcagcagaacgaacaccagcgtgtttccgtacattattcagtgcttcctgcccgattcgccacaatgcttcttctacattacgtggtaaagacagcattcccgtccgattcaccaccacttgtagaccctggctggtgccatattcctgtagggcttggagcagtccttcttccagtcctgcgggacgaagctgcataatcaatgcgcgcatttccttgagagcctcctgagacaaagaccgaatatccttcatcgcttccactgccgggtgcaactgttcggagccggataacatactttccacacctttagctgttaacgatagtgaaaatagaatctgattgaccgaatcatgcagatcgcgagccaatcggtttctctcctccagccgtgccagttcgcggcgattctccgccagcttcagactctcccatgaggctgtaatatgctcggccaatgcctccagcacttcacggtctgcctgcgcaggaaatgctgatcctattcctattccgattaccagaattcccgtttcccctggcgtgtggtacggaaggatggcagcaattcccgaggcaatggaattcatagtctggtcaggctcgcacagggtaaatatctcagcgatctctattgcagacagagatgttacacgatgactattgattactcggttcatgtggtttgccacttctgaagataacggagtactcgataacgttcgaaccttatcatctgcataggctgcctgcaagacgaacattccgtttttctgctgaataattgtagcaaaaggccaatcataatgctgcccaagcagctgtacaacttttaaagaaaaagcatcagaattgctgcattcattcactgcaagacccaaagcagtgctgaactcccctaacttggcatacagatcagctcgtcgctgctccgcacgatacaatctcatccgctctaccgcactaccaatctggtacgccacgctctgtaacagcgccagttcactgtcactgaaatgttccttggctggcgcagccacgttgagcaggccgagcatcttctcacctgaccttaacgggacggttgcatggtgggtaatatcatgggtatctccccattggaattccaccgcatcctccagccgtttacagttaatgatgttgaccgcatgattcagacgaccgtccttgaagcggttcacacaccagcaggtacccgttcgcatgggctccttatctttacgcagcaatgccgggggcagattgtaatccgaaacacaggtatagtctccacgttcattaatcagaaacatccaacctgccgttaatccggtcaactccagtaatttgccgacaacggtatccagcattaagttcagatcattggacgtattgagcgtttccgcgattgtcttcaacgtgaccatttcctgcattccgacttcttccgacatggcagacttctctcctttggctgtgccaactgtggtttgttcaactattgtacccaatccaccttggatattaaaggatcaacttcttcaatcactcactcagcccagcttctgtcgctctttgcgggacacagacaaaggctccatattaatcagacctcgatctgacagagccagtgccattttgtagaaagcacgtgtacgaatcttcgtgtacgtatccttgctgacaggtggatcaaacacatggttatacactttatagtcaaacacatcatcgtctttcagatatcgttcacagacgagtacacgttccttttcactcagtcgggacacaacaaaatcaatcgtatcgcaatatgcctgacgtgcgcgctgcacgtccacattgtagatcgccgttctcgccgtggaatcccccgtcacattggttgcaccgtggaaacgctcggcataacttgccgtcaccataacctctcgttcttcaaatgcaatggttttatagattcggtatttctccagcgcagcctcaacagctgtttgcgttttgcgtcggtccaattcgggcagcatcaattccatatttatcttcctcctttagtattcttcatatcactcactctatcgttcacgtcatgttgttttgcaatcgttctttgctcgatggcaaaacgctcttattcatagagttgtccagtttcctaaataaataacgacatgtcttcaatttcccgctgttgccttttggaatcactccaaatcggtataatccggggaattaccttcttcaaagagtcatttctataattcaacctgtgtcatcgttacattttgttcgtatagtgttcgtatttatatttgaggataccactttctggagatcggagtaaaccttcattttggttcgttttgacgataaaataaaaccttcgctctcatttcctatgccttttggcataattgtttcatatctctttacctaatggtatatatacgttatagtactgtttaattaatgaacttccgtacaagtcatttgatttttataagttaagatttggattagatatgcacgttaacggagaggacagaaagaacctgaagaagcgaagcgttcgcctttatcaccgaaattccacctatgaggatatacattcaggaaattcggggataacagcgatcggaaggttgttctgtcatcggagtgatctgtgcagcacgagctctcttaatttataattcaagcacttgtacgaatcgaaggagttggcataattgtggagcacgcttttggtccttatatgaaacaactgcgcgagcaacagggatacagcatcaatcagctcgccgaagcagccggaataagcaactcacagatatcacgtattgagaacggggtccggggtgtgccgaaaccagcgaccatccgcaagattgcagatgcactctcggtgccctatacagagatgatgaagcaggctggttatattgaaccagggagtgctgctgaacttcaggacgtaccggaatgggctacatacaaagaccgtcgtgatttcaaaaagatgctggaggacgatgatgatctgatgtttgacggtattccactcgatgaagaggacaagaaacgaatcaaggatgtgctgacaggtctgttctgggaagccaaacagatgaacaaacgcaaaaagacagacgaatcggacaatcgcccatgaggcatgacccactgaatttaataaggcagcaggtgagatcatatggatgacatcgtaacaaagctgattcgaaaacaccggaccaactgcccgttcagtattgcccgcgcggttggaatacagattcgtttcaccaatttggggaagtccaccaagggactgtactttcgcaagctccggcgcaggtttatcgtcatacacaatgatttgccgccggagtggcaacggttcgtgtgcgcccatgagcttggacacgaccgacttcataaagggattaatcgattctttctggaggaacattcctattttgctccaggcaagctggaaagacaggccaatcgttttgccattcaattgctgacctccggagtgatgcctgaaccggatgaatctttggagaaattttgtttacgtaccggactgccgcgtgaagcgcagcattttttttacactatttaagaacatacgttatttccgaagattatattttccaacagcagatttacatgtcactttcaggttacttatttttacgtaattcgcgagatttcctaataatagtctgttaaaatactatttgagctgtgtaaatgctcaagtagattattattttgggaggtttcggaatcatatgaaaatctggaagaattacgtttcacttctgctaacggtctgtttgctgtttggcagtgtaggtattgccgcagctgcaacggataccactccgggcacaggtaaacacattaccattctacatacgaatgatacgcatgcccgtgcagttgaatcttcacctgctatgggttttgccaaagtagctggaatcgctgacaaatatcgtagcgaaaacccgaacacactcttgctcgatgctggagatgctgtgcatggtacaacatttgccactcttgtgaatggtgagagcatcgtgaaagtcatgaatgaaatgggataccaagccatcgtaccgggtaaccacgaattcaactatggttcagatcgtctgatcgaactggcagacatgatgaacttccccatgctgagtgccaatgtgaagaaaaaagacggaacacgtctcttcgatccttatctcattaaagaagtagatggcgtgaagattggtatcatcgctttgactacacccgaaacgttgtacaaaacgaatccaaaaaacgtagaaggtcttgatattacagatccatctgcggaagctaaagttctggtaaacgaaatccgcagcaaagtagatgttgttgttgtactgggacaccttggacaagacgcgtccagcaccgatactagctttaaagttgttaaagaagtccctggcatcgacgtattcatcgatggtcacagtcacactgtactgcaagatggccttgtatccgataacggaacattgatagcaagtgcaggagaatacaccaactatgtaggtgtcatcgatctatgggtagacggtggtaaagtaacaaagaaacaagcaacattaattgatgaaacggaagcaaaagacatcaaaccaaatgagaaagtcgcgactctcgtgaactccattcaaaaagaacaagaacctattttgaaagaagaagtagccaatacagctattctgctggatggtaaacgtgaacaggtacgtgcaggtgaaactaacctgggtgacctgcttgcagatgccattcgtgatgtcagcaaagccgatattgcactgactaacggtggtggtatccgtgcttccatcgaaaaagggatcgtaaccaaaggtgatatcatcacagtgcttccttttggtaatcaagtagtaacccttgaagtgaaagggtccgatattctggcagcccttgaagtcggtgtagcttcctaccctgaaccaagcggtggattcccgcaagtatctggtattaagttcaaaatcgatacttccgctacagaaggtagccgtgtacattccgtaaccgtgggcgataaagcccttgatccggaagcaacgtatacactggcaacgaatgatttcacagctgttggtggtgacgaatataccatgtttgccaaatatccaactacgggtatgtatggcgcgctggacgaggcattgatcaattacatgcagaagcttggcgctgtagacatcaaaacagatggtcggatcagtgaagcggtaaaacctgcagtagagccggaaactccggcaacagaaacaccagttccaaccaagccaaaaccagaaacaccaaaaccggaaaaaccatctaaaccaacaccaagtaaacctgctccagccaaactgcatgttgtgaaatccggagattccctgtactccatctccaaacaatatggcactacttggcaggcattgcaaaagctgaacaatatcaaaaatccacactggatttatccaggtcaacaattgaaattgcctgcagcttcttaagctcagcaaagcaaagtgcatataggcatgatcgcttataaggcgcaacatcattcgaatcaattttgtcataaccaaaagggtgtcccccaagccagattactggttaaggggacacccttttggttctccgttcttaaacatcaatccacatcagatacttgaacatttcctgtggacatatcctgctgatcctgacaatcatctgaggcaaaaataaatcccagccaggcctttacggaccaactttatcatgtgccttcgacaccgaactatataagaactctccggaatgaccgtgttcatgcgtttattgtacatttaatttcgacatctctatcttctcaacattgcatacttgcacataaatctgcctgcgtatgatcatcttcaaatccttaatcataaaatcatttgtatactaaatacaactatccaaatatagttatttcgtatgatatcactcataaaatcctaccaaattgcatgcctatagccctctttttcatgctcagattggaatttcagcaatcaaaatcagctaccgcatcatattcggtactattatatgaactcatataattagaagatcccctgaatttaggaagtgagctgttccttcacataacgtacagcttcctgtgccgtcaacccgattcgtttcgattcacctgttgctgcaagtgcgtgtgatcccagttcgacctgtccttcggctgctcctcggccaataacgatctgcacaggcaatccgatcagctccgcatccttgaatttcacacccggacgttcatcccgatcatcaaccaataccgtgtaaccgctatcgatcaattgttgttccagttcgagggtgagctgacgctgctgctcatccttccaacttactgtaatcagatgcacatcataaggcgcaacagcagcaggccattttatgccatcatctcctgcatactgctcagctatagcggccatcaggcgggatacgccaatgccgtaacatcccatgacgggcgcacactggcgaccattacgatccaggaatgaagcgcccatggcatcactatatttcgttcccaatttgaaaatgtgtccaacctcaatacctttggtaaacacaagtggtgatccacatgttggacaagcatccccttccgcagcaaagcggattcgttctactcgctccaatgcaaaatcaatccctgggcgtacgccggaaagatgcacatccacttcattggctcctgtaattgcactcttcatcactgccacgtcagcgtccaccaccatcggcagatttagcccaatcggacccaggaatcctaccttcagatttggatgtgccgcaatggctgcatcgtctgcaaggatcagttcctctgcccccaacacctgcttcaatgcgatgtcattcagttcatgatctccacgcacaagcgcagcgacgagctgaccatccgccacataaagcagcgttttgatcatatgttcagcacctttgcccacaaaagtggttaactctgcgatcgtacgaacgccaggtgtcgagatacgtactacggtttccactcctgaatgttgatccgtttgaagcgcggagtctgcattcgcagaatcagctggaacttccaagcttccttcttttttctccatatctccagaagtctgataacccgctttctccagatttgcagcatatccacaatgtttgcaggttacaattgtgtcctcacccacatcagcaattgccatgaactcatgtgtttctccttgaccgccaatcgttcctgcgtcagcctcaacacggatatagtccagaccacaacgctccagaatgcgactatacgccgtgttcatcgcctgataagtccgatcaagctcttcccagtccgaagcaaaagagtacgcatccttcatgatgaactcacgtccacgcagcaatccaaatcgaggacggcgctcatcccggaacttggttccgatctggtacagggtgaatggcagcttacgatacgaactcacctcgtcccgcgctaaagcggttacgacttcctcatgtgttggtccaagagcaaattcccgtgcatgacgatccttcagacgcatcaattcgggaccatactgtgtgtatcttccggattcttcccacaactccgcaggctgcataatcggcagtaacacttcctgacatccagcacgatccatctcttcacgaacgatccgttcaacatttaacaatatacgccgtccaaggggcaggtaactgtatatccctgctgccagttggcgaatcatgccggaacgcagtaaccagcgatgtcccgctgcatctgcctccgctggcgcttcacgtaatgttgggacaagcatttcactttgacgcatcataacacactcctaatcttccttttttgttatcaaatacggcgcataaacagcaaaaagacacatccgtcaagggacgaatgtgtcgtggtaccacccttatttaactgcaaattaatccgttcgcaacctatgcgatctgtaacatgcagtcctacggggcataacgggccctgccggcggaggttgcaaccctgtatgggcattctcttccgcagctcgcgaggtaggaatttatgaagcagctacaggaaccttgcaccacaccgttccctctctgttgaagctggcttgcacaatcatgtcctcgttataacgctgttatcatttttgaccacattagttcatttacaagtaattgtcaaccaattagtcgaatacaactccagaataatactccactacatcacgaatgagcataaacgcatccccatttgtaagattgttcttgtcagcaatgccagcaagcgtgtcggcacttataaagttttgtgtttgcaaatgagcaagtgcctgttcaagtgaagtttccgtttctgaagatcccattgccagacataacatatacgcagcctgatccaacgttaaaggtagggttacggcattctccatatttgctagagcttggtcggcactgcctgtgtaggcttctggaaacatcgcttgcattcttttcaatttacttaaaaatcgttctggattcattcctttatccagttcccaaccatcgttatcataattgcctgaagtcatatacatactcgctgcagccagcaatcccttgtaatccttatgctccatataatcaggctgttcgaaacgatgtactttcagatccatcccctgattctccagcatcttacgtagttcagatgctcgctcttcggaagttgagagttcgcggaaggactccttatggatatatgccagcttgaccgccgctcctgctgcttctccctctgccattcccagtgggacaactcttgcactaccgtgtgggattgtatcaaaacttgctgcacgtccaacgacgagcaaaccatcaacctttagcggtacaagcgagcgaaaaggtacaccatattgaatcggactcaacataatcgtgccgggatttccaacactcgtgctctgaatatcaatatcgtatgagccgtatccaatagcatcccaatgatcacgattttccatgacatcagctaatgttaatcggtactcgccatagatatgacgtgattctctcacgtaaagctcgtctgctgttccagcatattttagccctgcaaattcatcataatttttcttcagaaaatcaacaattagtggggcttctttacgcccgatttccagaccttttttcacagatatcggatctaacggatctacctcaaagatttgcattgtattaatcaagattgtatcatcattttgtcttccgatattcagactgcgaatcttaatatgttgtggattcgaggattcatattttcgagcatcaccgtacccccaagcactcatcttatcaaccccggttccctctctttccctaaacttttgccatacctcatcagtaacaccgcttagcttgaatacaagcgtagagaccattttggatttaccatctccaatatcttgtctacctatggagtatggaactcctgcagcggctgcaatatccgcatcttgcgttgcatcaatgatggagcgggttgagatctgaacagttgttccatcttctttagttatgctcatacccgttattgtcgtgtgatctcccgtagattgttcagtaagggggactaattccttagcattcatcaacaggtcaatattaggttcagaacgaaccatccgatagaaaatgttagccgctgtattggtatcaaatgaactaccctcgatctggtcaaaccattcctggaaaatgcctttgttcaaaaagtcaggctgccgcaaactactcaataactgcggttgttcaggggaataatttagatccagcgtattaaggcctccctcggtcaacaatcctcccaacatgttgcgatctcttgcttccaccagcaatacacgcatcccattacgagcagccgataaggcagcagtaataccttccggatccgttccagctacaataacgttataggaatctttcaggtttagtgtagattgcacgtcctccaaaggctgccatacataattattattaaatttataatttttgttccaaatatagaatgcaccatatgcagcgctcattaaaacaataaacacactggctataattgctgttattttcaattttctactaatcaaagaaacaaacctccatatgtactttaaattcaataatactaactcgtgaagtagttttcctatgttataccaacaaccgactaactttttctcctttcctacatgagtatgctataaataataaaaaactccccaacacttcaaacggtgttaggaagttctgataataagacggaaaattctacttttatgttgccataaatacaaacaaaacataggaaagtccctaacttccctcattataacgaccactttttgcgaagtaaagacttaccaaaatcggaaatgcattagaaagatcattaaacactcagactgttcgttcatcctgactacaatgaattctctggcgatggctgacatggcagcacgttccctgtaatatagagaaatagaaatctatcacaggtattaatcgataaaggagcttgtcctatgccatatatcatatatgatcttgaattcacggtaagtcgcaatactcgctattcttctgaaattattgatatcggtgccgtcaaagttacggaaagttccgatggattggtcgtaacggatacgttccatacgtatgttcgtccttccaacaagtccgtgctgtccactgacacgattcagtttacaggtatcacgcagaaagatattgatgcagcccctctttttccagcagcattgaaccaattcattgcctggatgggaagtgacccctattacatgtgttcctggggacccgatgaccgcagcaaactgatctctcattgtcgcacccatcaacttgatgtggcctggatcaccaatcataacgatctccagcaacaatggtcccgcaccgttcgtaaagaaggcaagttccgtcaacttggactcgctcaagctcttgaaatctgtggaattgaatttgatggtacccagcaccgcgccttggatgatgccatcaatacagccaaggtgtttatgcatcaatttgaccgattcactctggaaaacaactgtgcagccgatgatgagggcattacatccaaggttgtttattccagctccacagaagatgaagaaaaagaatctccatttggcaatctggcaagccttttcaaaaccaaagagtaaccgtccacagcacaatacttaatcgtgtcttggcttaggatggatggcattctaatctcaacttttattgtacatttgttgccaatagtttaggcgttctttcatcttgatgcggtagatttccggttcgagaatttccgcatcaggtccatatttagatatccatacgagaaattcgtcaacatcacttaatatggcttcaaataacaggctaccttccggttcaatggttaggatgggtcgcataaaaaattgctcctgcatcacacgctccacagcatggggtgcaaatcgaattttgaacgcagtccactccgtacttccctcgtatgcccaaggaatgcggaagtgcgattgcatgagataatcctctttgcgaaacgtgcgtggcaatatccgtatcttttgcagccggctcacctgaaatattcgaagtttctccgacaggtgacaataccctaacagctcaaatctgtattcacgagggataagacagtaaggatctatacgtacgatcccttttttaccttgagacagatactccccttcaatggtgttctgtgaaatgccagcctgaagcagggtaatcatggattgattctgcgaatcgttgttttcattttgccatgcgggcaatcccgctttgaacaatccactaatttgctccgaccattccactcgttctgttttgtttttctgactcgcagcaaccactttctcataagcgctctcaaaagcaggtttcagcaaaggacgaatattctccataacttcagcaagatgcatgaaggcttgggcttcttcatcagaccaatttagcggatacatggcaaattggctgataaacatgtacccttgcccgtgtcccatattggcgatcgggatatgcattgcactgagggcctccatgtcgcggtatatcgtcctttccgtcgtctcgcatcgctgggcgagctcacgtgccagtatgcctggcttcgcctgcaccagcgttataatgcgcattaatcggattagtcggtctgtcattttgccggaccctccacgatgttgtttcaataaatttgatacaactccatccattgtttaatatgatattgatacatacattcgaccttctcctaaacttcaccttcaaatatgtagactctctctataccgttaccacctgaaatcaaccctactcccctaatatctttttttcacggtcatgatatccggttgtaaacgttatctcatagtgataacgcaacttttcaacgatctcggcttccgcgtaatagtccagatcttgcttccgcgcagcttcaattaacaaggcatcagcatgacgacgtaacatattacttccctcttgaacccggcctctttcgtaggcgcgcagggcttgtttgatcaggggcacggtttcacttaatttgatagtcttctccaccttgggatcttcgggctgtctcagcatgcccagatgactggtgtactgaatatacagctgttctcttcgtaacaatacacgttgactttgcttcaactttcttgtgctccagtaggctgaacatacggcagcttttcctgatacacggggtcccatgacgaattcaagcaaaatttgcttgctttcccccttatacatatcgccaagtctcagtacccagccaatatccgtttccttggaacgacatccatagataccttttagctgtactccatattccggtttgagcaaaagttccaaatctcttgatacaattttgggtgctattttcctaagtcttttggcaggggcaccgttacgccactctaccatcatatatacggggtcggctccccctgtcggtatggcctctttattccacgaataagatacttcaaagactgagttcactggtagtctctcccccgatttatgtgtattatcttctaagttatcagggtgaatggacactatattgtcacggaacacatgttctcattaaatttttccaatatattagttttatatccctaaatccgtctcaatacgacaataaacgacgaaaaagcctggcactatgccaagcttatcaatcacttatctatgacaagtcccaaattaaacagtaggatgatcgattcccattttgtgtaaatattgtacaccatctgcttcgtttaccggtgcataggtgacactgtcaatgaccagcttacgccctactggctctccattaacagtgatcataattgttttggttgatgtgttctgatctgttgtgtacatatgtttctactccttcatgttcacgatcttatattcaatcggatatattggtatctttcattaaattgcgcatttgtgaatagcatgcacccggaactgaagtaaaagatctgtaaaacggtccggtatgcttgcctatcgttctattacccctcagatttgtaagctaaacaaccctgttcctaaataattttatatatttcgggtaataaaacgatatcatcttgaacccatcgtcccggttttgacgtataatgtaagagccgtatttcaacaatagacgacgaattcggcgattgatctatctaaccgaagaaagaggtgttaacgatgccaaaatccattcagggttatttcattcgggtgttattcaccacatgcattctatttaccgtttcgatcgcttcgacagtaagtgcagccagtgccaatatttttacggatatatacagcggatgggagcgagtctccgaattgcccggagaagtgaacgctctgcaggaaagttataagcaaacgatggagcaattaaatcaaacgtctgctcagttgggacaagcccaggccaatgtcgaagcatttaagacccagaacgaacaactgctggctcagaaccagaaactaactgaaatggtaagtaaattacaggacgaccagaatgccaaagcagctaccaccaaacgaattcagacgacgatcatcactgtcgtttctctcatattgggttactttgttctgattcgtgtgatgcgctggggaatgcgtcgccgttcgggccgagtataaaagaacaggagcaactgcatgaacatacacctgaacaatgctgaagcaggcggagcaggacaagtcgtcacattttcactgattaaagatgaccgccttcatattttgcatccgcagcaaattgtggccttccgcggtccaagtgggagtcgcaatgataaattcatgaatatcacgggcatatatcgcaaaaaaaagctgattaaatccgaaatcaccggaccttgccaatttgtggctgccctgcctcccggattcacgatgaaggaagtggagctcacggaggacagtgatctgctctatgacttccgccacctgttcttctactctgatggtgtaaccatgcataccaaaattcagaaaatcaaaaacatgctgatcacccgtgatgcagtgaaaatgaaattttccggcaaaggcaaaatcggattgctcactcaaggtcaggtctgccaacaggaacttcacccaacagcgccactctatgtggatgctggcagtattattgcctatcctgaaaatgcacatctggaactcaccgtatatggtaacaaccttgccagtcagcatatgaattatcattggaagatgacaggacatggatctgtactctttcaggctggacgtgagaatcaccgcttggaacaggatctcaacgatgagggactattcaaacgaattctgaaagaagtgatccctttcggcaatgtattgatcaaataagctgttagttggtggagccgaccgattagctgccactatgctccagtggggtggtcaccacaccgtttcatgttataatggttcagacaattgaagaagaaaatccatgcctctggcatgggagaggttcgcgaactccctctataagacttggccatgtgatggtcagtataagtcttgcgtacacgttgcggtcaccatgcaatcatgtacgtaaaaaactaaggacacttactcttgcctgcttttttgaagcggttattgagaaggtgtgttttttgatggatgccagttcatgaacttctctgttcttccgacactctatgcctatgtgcatggtttgatctcaagaagatagagaggtttttttatgttgaacgaagaaaaagcagtcgttgtattcagcggcggtcaggatagtaccacgtgtctgttctgggccaaacaacagtttgccgaagtcgaggttgttacgtttgattacggacaacgccacaagctggagattgaatgcgcagcggaaatcgcacgtgatctgggcgtacagcaaacggtcctcgatatgagcctgttaaatcagcttgcacccaatgcgcttactcgcacggatgtggagattacacatgaagaaggcgaactgccgagcacatttgtagatggacgaaatctgctgttcctcagttttgcggccattatggcaaagcaaaaaggagcacgtcacctggttacaggtgtatgcgagacggatttcagcggatacccggattgccgggattcatttgtgaaatcgatgaatgtgacgcttaacctgtcgatggactatccatttgtcatccacaccccactcatgtggctggacaaagcccaaacgtggaagatggccgatgatctcggtgcctttgattatgtccgtgagcatactctgacctgttataacggtgtgatcggcgatggatgcggagaatgccctgcttgcaaactacgcaaagccggactggatcgctatgtacagcaacgttctgctgctgaatcggcgggagtggatgtacgatgagagaacctggaacattccgtattgtagagcatctgcaacgcattggagaagatattctacccacccagctgcgctatcaccgcaaacgtgtgcttgtaagcaaagaattcacctttgacgcagcacatcacctgcattgttatgaaggcaagtgcaagaacctgcatggtcatacgtataaagttatttttggcatcagcggttatccgggtgaaaccgggctgacggttgattttggacatatcaaagatatatggaaaactcagattgagggatatctggatcatcagtacctcaacgagacacttcctttaatgaatacaacggctgaaaatatggtcgtttggctgttcgaacagatggaacaagcgctccagacggagccctatgccgggctgaccgatggtgggcggacggagtttgtccgactctttgagacacccaccagttacgcggaagcgagacgggagtggatgatcgatgagtagtgtgacacagcaggtgaatgagacgggatctcgcaaagtggctcgtattcccgtgatggagatttttggtccgacggttcaaggcgaaggcatggtcatcggacaaaaaacgatgtttgttcgtaccgccggctgcgattatcgctgctcctggtgcgactcggcctttacctgggacggcagtggcaaggaccagattcggatgattacgccggaggatgtatgggaagaattgcgccgcgttggcggcacgcgtttctcccatgtgactatctctggcggtaatcccgccctgctcgcttcgctgggcgggttggttgccctgctgcgggagaacggcatccgcactgcggtggagacacagggctcccgctggcagccttggctggcgaacattgacgaagtcactgtctcgcctaagccacccagctccggcatggacaccgattgggccgtgctggatgatctgatcgaacggctggccgctggcccggtagaacgaagtcatagtctgaagatcgtgatcttcgatgagacagacctggactatgcccgccgtgtgcatgcacggtatccgggcacggatctatttttacaaaccgggaacccggatgtgacttccgccgatacgccagatctggcgtcctcgctgcttgctcgttatgagtggctgattgaccaagtcagtgcctccaatgacctgaatgatgttcgtgtgcttccacagcttcatacattggtatggggcaacaaacgcggcgtgtgatgggtagtatgggtggaatgggcggcatgatgtaaggatgaggacgaaatgtccttagaaaacaagagaattaaacaggcgaaattgcctattcatatataccgcgaggctttgggctttgacggaaacaaggagcgtttaataaccgatgagacaacctgatgagatgcaagatgtgacgttgctgggcaaccagaacgtaaaatatacgtttgaatatgatccgggaatcttggagaactttgataacaaacatccgtaccgcgattattttgtgaaattcaactgcccggagttcaccagtctgtgcccgattacgggtcagccggactttgcaaccatctatatcagctacattcccgatgtgaaaatggtcgagagtaaatcactcaagctgtacctgttcagcttccgtaaccatggtgatttccacgaggactgcgtgaacatcatcatgaacgacctgatcaagctgatggacccccgctacatcgaagtatggggcaaattcacaccgcgcggcggcatctccattgacccgtatacgaactatggtaagcctggaacgaaatacgagcagatggccgaccaccgcatgatgaaccatgatatgtacccggagacgattgataatcgttaaactggcgggtaaataaactctgctataactaaaataaattataggacacagaaaagccgaactcttcaaaacctgaagagatccggctttttctttggttagtatacacctgtatgagactaagtgtctcaacgcaattggatcgcagcgcattcaagtagactgatcttcctttagtgctttgatttttttaatgtaatgtctcaacatcagcacaccaatcgattgaaagatgataaatatgacgatagccacagacaaagatgctggggaaacatatatagcctgaaacgttattacagccatatacaaaatagtcatcaccaactcacgtttggcggattcataaggtgataaggatttcatatccatccctcctctatccttcttacacataaatatgggtcttcttacagtagatgctaaagtaatacgtttcttttgtaaatgtacgttttctcatgttccccttgtcggtccaatcaatctatcctattatgtaacaatatgcttacacgcatatattacaacatcaggcgctgatccctcgtgaccgcgaccaaaggagaattgtacatgtccactcaatccactttaactaaggacgccgcagcgcgttcgaaagccccacccggatcggatgcccaaagcaccgtttaccggatactcattgccattagtttggttcatctcttcaatgattcgatccagtcggttattccagccatttttccgattctgaaagattctatgcatctcacgtatactcagatcggatggatctcatttgctattaactttaccgcatccattatgcagcctgtcgtaggctggtttgcagataaaaaaccgacaccatctatcctgcccattggcatgggctttacatttaccggcatgttgctgttggctttcgctgacagttatatggctgtcctgatttccgttatctttgtcggtctgggttccgctgctttccatccggaaggttcacgggtatcacacatggctgccggtcaacgccgtggactggcacagtccatcttccaggttggtggtaacgctgggcaatcccttgccccattgcttacacgctggatctttatcccgtttggacttttcggtgccattggatttacaggaattgctgccatggggattgcagttcagatctacatagcccgttggtatggacgcatgctgcaatcgggaggatatctgcgtagacaggctgctgcccgtcgtgcacccaatcctgctttgcgcaaaaagattactgccgccattacgctattgatcttgctcgtctttgttcgttcctggtatatcgcttccattggcagcttctatgcgtttaatctgaaagatacttttggattgtccacagaagacgcgcagatctatatcttcttgttcctggctgccggagcactgggtacgttcttcggaggccccttggcggatcgattcggcaaacgtaacctgatcttcctgtccatggccggagctgctcctctggctctgttgttgccctatgcgaatctattctggacaggtgtactgctaaccattattggctttatcatgttatccagcttctcggttacggttgtatacgcacaaatgctgattccaggcaaaatcggaacggtttccggtctaattactggtctggcatttggtatgggaggcctgggcgcactcgtgctgggcaactggattgacgttttcggtgtatcacccgtaatgcagatgtgcagcttcctgcccctgctcgggattttcacattcctgcttccatccgataaattactgaatatctgggcgaaagaaaacggtagtgaagagtaaaaaattcatcaacaggtgtccactttttattctatattagatccaatccttacgtggcagcatcgcccttataagacgttatcttgcgctaacgaacatgacagcacttatttgaacgaatactgccggtttcccaatctaaagaatctgagcaacgctattcccgagaaaaaggccgaaaaccttggaatgtgcgtgtgagatgcagaaataacgtgtctgagattctttagaaatcgtgattagtgaaatatcgccgaataacgtctgctgagttcgttagatttcactttagtcacctacatttgcagtctaaataaaatgtttgaaccataacaaaagggttcttgccaactctgtattcacagactggcaggaacccttttgttatatatgtttttctcgtatttagcttcaaccgtttattccacgtcacacatgacaacgctgctaccttgagctgtaatcagttccttcacatcttcaaattcaagaaataccgttgccgtattttccatgggatgaattccaattttctgaccaactaaatccttgtcaaaaactacggtcacgtttttctgaatattattgagaacccccatagggttgacgtgccctttttccaatccgaggaactccaacaaatccttttcactggcaaaacttaatttgcggctaggtatcttttcgcttaaacttctcaaatcaacggacttcgtcccagcaatcgtcaccagataatagttgcgcttcttgtcatcacgcagaaacagatttttagcgatacgttctgtatgtggaatctgataagagaatatttcctccatcgtgtatactgcgggatgttcaatacttttgtaaacaatattattgcgatctaaaagatcatagaaaccctgtttgtttaacatatcaaattcatctctttcaatataaatattcttctatcatatgacttcttctgtaatattacttcaaacgctgaaggatcagccgttttttgtacaacattttgcctgcttcggcgacatctcgaattgtatttttgttgctcaccgaaccaaacaccatgcctgcaatcggcacaagttggaacagcttcttccagccaaaagattcactgtaggagttaaacacttcccgccatccctgcatctgcgatactacttcaatgggtttgtcgggatcatcataagcggccagttcttcaatgatcgctttcttgcctacaatatcagcggaagagaattgcagacatttgacaatgaagatacgctccagcggttcatctggatcataaccataacacagagccatctcttgcagtaccttcaaggaaagccccatcaccatcggaatatctgcagcaatggttacaatgccaccaaaccctgtagctgctccctgagccgcggcaaacttcgttcgactctcggtaatgttatcagccacctggtccagcacctgaagtggcagattctctacactatgaatctttgctgtcccctccgcttcagattcctgctccagacgataggtcgtatccatcatggaataaccggacctcccggcttcctcttgcaacagcttggctacttttttcttctgtacgagaaacttgcccccattctgcacatactgacccacgtcgttcagggaatctccgatcttctgtttcagcgctttaggcatcactttatccaacatcgcaaagggcaaacgcccgattttatcccaaataaacaagtctttctgttgtttctcccatttcaaaatctgttcaagttccttgtccaacgtctcgcgtgaatccatatgtgatcctcctaataggttctgcatcgtaatctgtatctctctcatacgcagaaatcatcgttgtggttgctttgttttgtgtccaggacacttatgttcaggccactctatcttatcgttcacacacagaagagcccttaatcagcatcactcgctaactaagggctctcatattaaggtttcactacctcttattttgcttctgctactgcgctgccatctgggaccggaacaccgaaatcaggtgtgccatcttcacgccaatgaatcacttgagcacgggcatggcggttcggatcatacaagggatcaccctcgatgtctttgtaattacgcgcatgataaatcagaatatcggtcttgccatccggtgacaccgtaaagctgttatggcccggaccgtattggccgttcgcttcacaagtctggaataccggctcgggtgatttcacccagctggccggatcaagcaagtcggcattttcatctgcagtgagcagacccatacaataattgtaatcagtcgcgctggccgagtagccgatgaacaaacgcccattccgatgcatcacggctgctccttcattgaccttaaagccgatgatctcccaatcatactctggcgtagagatcataacctgttcgccgcgtagcgtccatgggttctccatttcggcaatgtacaggttggagttgcccacaatatcaggatctttctgcgcccagaccagatagcgaatccccttatgttcaaaggttgttgcatccagcgcgaatgattcccaccgggtgtgtatctgtcccttttctacccactctccttcgagtggattcgcggaatcgttctccaggacatacatacggtgatcaaacagtccttcgttggtctcactggtgtgagccgcagcgtagtgtatgtaccatttgccatcgataaaatgaatctccggtgcccaaatgttggcactcattggccctgtgtcacgcttcgtccaagccgttaccggctcagcatctcttaactcttccaacgtctctgctcttcggatttcaatccggtcaaaggctggcacggaagcggagaagtaatagtaaccgtctgtatgacggtacacccacggatcagcacgctgctccagaatgggattagtaaatgtaatagaatcagtcatgggaatgctcccctttcaaatgttgtttggctcgaagtttggggatgtaacccaattgcgaaaaagcgaaaacccttttggggtggtgcacaacggacgttcgggggtggcagggccttggtgctctcttgtcctccgatttctctttccaccgctcttagcggttgaaatcggatgccaaactcgctcctgcggctccttcctccccctcactgcttgtgcaccctcggagcggtagctcgctcttaccgcgctcgctgggttacaacctcacttcgagcctttttgttggctcggtcttatggggttgaccacttcgctgggtcaactctcccccatgtaatgtagggctagccgcagagctacaggctagctttgtggtgcacagcggattctcgggggtggcagggccttggtgctctcttgtcctccgatttcttttcccaccgctcttggcggttgaaatcggatgccaaactcgctcctgcggctccttcctccccctcactgcttgtgcaccatcagagcagtagctcgctcttaccgcgctcgctgctcgcccccttactcctccgctgcgctgatctgcttgccccagaccgctacaccgcggtcattgaggcctgttaccaccaacgcgggctggcttcgctcccagtcccaggacgggagcagcttcagctcttccgtggaagctccgccccatgggctttctttccacttcagtgtcagtgtttgtttgtcatcaaaggtccaggtccctgaacctttttcacttttaattttaccgttgcttgttagggtataaggcacggcttgaatctgcccgtctaccgacggatcaagcgccatgccttcccactccccggcaatcatggacttcggaatgtcctgtgctgtctcaccggcgtaacgttcaggtgagaccacaggccagccatccttcgtccataacattttgcgtacatgcagatacggccagtttttatccgtctcgccccgtgcatgatgcacgatgtaataatcgtctccgtccttcagaacggagttatgtccaggcgcaacccagccctcgccttctgtgaaacgataaccgccgagaattttggtgccgatctcatattgcggcagataatctgtatccagcatgttattgccgtttatgtccgtatacggtcctgtgattgaatcagcacgcgcaacccgcacgttataatcttcgaacaaggaatcataggagacgaacagataatactttttgaactccgggttatacacaatgtatggaccttcgactgcgccctcttcagttgcacgatcccgagcagcaatacgagtaccgtaaccgtcgtccttgaatttcccggtgtcgggatcaagtggcgcaatgtagatgccatcaaagaatgaaccatataccatccacgaattaccctcggcatctacgatgggattagcatcaatggcatttaatttgtcctgttcattcgcagaggttttcacaaccagcccttcatctgtccaaggaccttcgggagatgaggatgtctgaagaccaatagccgactgggtactgccaaaagaagaagccgaataatacatccgataggtatcaccagcctggaccacatccggtgcccacagattgaccgcacctgtccaatccagcgcttcttgcggaatcccgggcagagcctgacctacccatgtccagtggatcagatcatctgatttgcgtaccatgacaccgggtttcgcttctcctgctacacgaacatctgtggaatagacgtagtatccctggtctgttttgataatggccggatcatgcgcattgttcaccgtccagcgtgattcatcgtccaaaatggaagtgtcatacagctgagtatcttgaggagcttcaggaaagacgggacgggacaccgtttctcctgctccagaacaaccagtagctccaacaaccaacaataacaacatggaagcaaccactccttttcctgaattcgaccaccatcggaatttcttccgctggttcatcccttcactcccgaaatcgcaaccgattcaataatctgtttctggaagatcaggaagatgattaataccggtaacagagccacaatcgacgccgccataataagcgggtaatcggtttgaatcgcatacgtggcattgaagttcgctataacgagctgtaacgtctgcttctccggtgaattcagataaataatcggtgccagataatcgttccagatacccatgaaccagagaatcaactgtgcagcaatcgccggtttgatgagcgggaacgtaatactggagtacagccggaagtaggagcttccatcgattttggctgcctcaataattgcatcaggtacactaagcaggtactggcgcaggaagaagatcataattacgttaccgaacaggcctggaacgatcagtggcaacagcgtatccacccagcccagctttgcaaacatgatgaattgtgggatcatgactgtcggataaggaatcatcatggatgccagcaacgcgagaaacagtttgtttttgtgcgggaatcttaatttggcaaaggcaaaggccgcgatactggacgtaaacgtacccactaccgttacactcaccgcaacgatgaggctgtttttgatcccgctgagcagcgggcctgcttcccagatttctttatactttccaaattggaatacttcaggtatccatacaggcggaagcgcgaacacatcttgcttctccttcaatgacgtggacaacatccagatcagtggtgcaatcatcgcaatcgccccaatcgcgagtacgataaagatgatcgagtttgttaatttcctcttttgactgtaagacatctccggttcactcctttccttgacaatcaatccccatcataggctgatttttcgttcattttgaattgcaccagggtaatgacaaaaatgaaaataccaagaatcatggccatcgctgaggcataacccatctgcaagttactgaatgctttctgccagatgtagaaaacgatcgatgccgaagaatattcaggaccacccgtaggtgtcataatgttcatctcggtgaagatttgggaaccgccaatgatatttgtaacaatgaggaaaaaggtaactggcttcaccataggccaggtgatattgcggaagatttggaacccattggctccatccagctcagccgcctcgtagtatgtacgtgatacactttgcagtgctgccaggtacaacaacatcgtgtatcccaagcctttccacaccgtcataataatcagagccggtttgaccgtgtctttgttcgcgagccagttaggccctttaatcccaaacagatcaaggaactggttcaccagaccgtaatccccgttgtacgcccagttccacataatggacaccgcagcgagggaagaaatgaccgggatgtaatagattactcggaatgtcgtggtgcctggaattttacgattcagacccatcgccagcaataatgcgagcaacaatccaattggaataccaagcatcaggaagaatgtattaaacatcgctttgtagaagaggtcatccgtgagcaaatccttgaagttggccaaaccgataaagttcatctgtcccaatccgtcccaatccgtaaaggaaccataaagggagtagaggaacgggaacatgacaaagatcagcaatccaagaatcggaggtaaaataaacagatatccgtacagcatctctttgcgatacaaactcgatttcgtaatcacggcgttcacccctgtttctagtatcagcatgtggcattcttcgattgaaccttgtcgatcaacgaatgccacatgcccgtatggaatccaataagttccaatacgaatgatgccagcagcatgattgcaggctgccggcatcaccctttcctatctactatttctgagatttcttttcttgttcaaccgctttgtcgagcagtttttgcattttcggttgttgctgcttcacatagtctgcggctgtaatcttgccatccaataccggctggatgtccgtgaagaacaggtcataccattccgcattgtacgtgtagttacctggcagagcccggccgtaatcttcaacaatatcaatgaattcctgtttgttggctggtttcgtggatgtatctttggcccactcgtctgccatatcaagcaagttcggaatttgtaccttggcatctaccagttgctgcatgccttccttcgaagccgtaaggtagttcaccaatgctgctgcttcttctggatgtttcgttttggcagatactccgattcccagagatccgatccacgttgccgatttgccagttgatcccgcagggaatggcagcaaatcataatcgaaaggcagtttttcaaatgtgctcatatcccatggacctacagggaagaaagccatttcacctttcatccagcgttggtacgtatccaatgtttgcgcttcctcaatagaaggtgtgattttgtatacgttctgcatgtccgcgaagaactgcagtgcttcagcgaatttcggatcatcaatcgttacctttgttttggtttcatccagccagtcgccaccgttgctccatacaaaggattgcagggcccactgtacgttgaatccagtaccgtatacatccggtttaccgtctccattggtatccttggtcgcttgctggttcaccttgatgaactcttcccatgtatatggtttatccgtgtcagggaatggaatgccctctttttcaaacaaagtcttgttgtagcccagtgcaaatggccccagatctttcggcataccgtagatatcaccttggcctgccatttggccatcataacgatacagatccacgccgtatttccagatattatcgagatcaacatccgggttattttcaatatacgatgtgaggttcatcagcacattgctgttcacatacgctttcacatcgcccggattgatgtagaatacgtcaggcaagctgttgcctgtaattgccgctctcagcttggttgcatattgatccgcagccgttacgatgattttgactttcactcccggatgatcttcttcgaatttcttgaccaccgcctggtaagctttctgctcgtctgtacctccgcggaacataaacgttaactccttgtccccactcgcgccgctgctacctccacaacctgcaagtaccagcgcacttaccagcataagaagcataaatgtgacccaattctttttctttaccatctgaacccctcctgatctggatttgtaaccgtattcaattggatgaaataggatttctgttgttaaatttatcaaatccagatcactttagtcaacacttttataaaacattttatatttatttaaaataaatcaatacatcggccatccgttcgcgtcccacagcaagtcattaatcagcaatttcggattgccattatcctctgcatcataggcgtgtcgtgcaatgacattgccgttgtacacgtcctgaccacctggacctttccatttcacgttgcctgtatccaatatcgttccgccgccattcagcatattcactccgtttttatccacataagggcctgtaatactcgtcgaacgcccatagaccattttgtaggtactgtttaccccttggcagcaagaatcgattgaagcaaacaggtaatagtatccgccacgatatacaacacttggtccttcaatagcccccccgttattcggacgcgcagcaatggaagttatgcttcctgtcggtttcatcgtgtttttgtccagcttgacaatcttcagaccgctccagaaagaaccgaaggccagccatgggttgcctgaagcatcaatgaccagattcggatcaatcgcattataattattggcggtcgtagtctgaagcaccaatccttcgtccttccactgccctgctccaatgctgttggcagacgcaagaccaatcgcagaccgattggagccaaaggtggagatggaataatagagccatacttttccgttatactgctctacgtctggtgcccatacatccaatccactttgtcccggaacagcagaagcccaccaggatggcttgcttaagaagatttgtggaacacgataccaggacgatccattatccgatttcaatacctgaatacctgggccggttgaaaaggtgtaccacgagcttccctctttgataattgatggatcatgaacggcggtatctccggtcagattccagaacgccgccaaagcttttgactgaccagccagtagtaataccatcacaagtaatgccggtaacgccaaccgcttccacttaaacctcttcacattgctcaacttttccaaaccgaactccacctttcctgatcaaatggttaattaggttcatgaagtaatgaatcaatttaggtataataggattataaaagcggtttcattacatttcaatggtatatttcaaacatatgtaaactgattaacacttattttaaccggaatagtgaacaaaatgtagtttatattttcatatttgtgctatgtacagcggttttggcttccatttctcagcccttcccttccatgaaggaatgatttataattatctgaaataaaacatataaatgtgcaaatgtctgcaatgaaaagagactttgttcagaacggggaaaggaatccacctatgatttatattaaagatctgatgtcgggtgtgaatatcttcaaagcgctcagttcggaaatccggattcagatcatcgagctgctggccaagaaccaaagtcttaatctcaatgatctcgcaactaagctgggtctcagtaatggcgctatcacaatgcatatcaaaaagctcgaagagagcggattgattgagatcaacaccgctgttggtaaacatggcattcagaagatatgttatctcaatgaggaaaaattaatggttgatctgcgttcacaggagattaacaatcgttacgaggtggaaattcaggtcggtcattacagcgattatcaggctgcgcctacatgtggtctcgctacccgggacagcattgttggagagttcgatgatccgcgttactttgctgatccactgcgaattgatgcggagatgatctggctggctgaaggttatctggagtatcggattcccaactatctcaagccgaatcagtcgtttagcgaaattcagttgtcgatggaactgggttcagaggcacctggcttttgcgacaattatccttcggatatttatttctacattaacggtattgagattggctgctggacgagtccgggggattttggcaatacacgcggtaccttcaatccggaatggtggcctccccatctgaatcagtacggcatgctgaagctgatccggatcacacaggaaggcagctatatcgacggatgccgcatctcggacgtaacgctggatcagatcggtttggattacaaaagcgatattcacttccgcattgcggttactgacggccctttgaacaaacggggcttgacgatcttcggcaaaaactttggtaactatggacagaatctgcttgctcgcgttctctataacgtgcaagaggaatagtgtccattctgactaaaatctcaaaataaaaaaagttcgaccgatctgctaacgtaactgttcaacaccaacaatcatttgtcttagaaagggtgctatccagcactcttttttgtttcatctcaccgaagaacttgtccaatcaagttggaacaacacatactggatgatatgacttctatagcccctctgtaatcctccatgttgtttaccctggcgtgatataataatggcctggaatgacaaaatggaataacgggcggggatagcttttgaaattggagcgattaatctcaatcatatataaactgttgaaccacgaagtgttgtctgcctccaccttggcggaagagtttcaggtgtctccaagaacgatctatcgggatattgatgtaatctgcgcagccggctttccagtcgtctcacaccagggacttaaaggcggatatggcatgatggatggatacaagatggataaaagcttgctcggttcgtatgatgtcgatgccctgattacgatccttagtagtctctccactgtcttcgaagacgcgcgtgcacagggaacgattgaacgtctgcaaacaattggaccggagcatcagacctcaagtctatccgtggatttggagactcgccgaacggaacctgatgcccttcctcatctccgtacaggtattatgaagcatcaggttgtgcgttttgactacatcaatacgaagaatgaacatgcaccccgtcatctggaaccggtaagactccattttaaatatcgtaattggtatgtgtatggattttgccagacaaggcaggattatcgggagtttcgactttcccggatgatgaacgtgcacctgacatcggaacactttcaaccacatcttgagcttcctcaagagaatgttgtgtcagatccatcatggcaagatcagatcagtgatgttgtttttcgagtgaaaccggaatcgctatcggaagccatggatcattttcaacaggcggaaaagcaatttcacgaagatggaagtatgacgatgcgcatccaggtccatcagccgttacaagccaagtggttatggtcgtttctactcagtttgggcagtggcgcccaggtgcttgaaccgattgaattacgaagcattctgaaagaacagcttcgaaacgcacttaagctctataaagaagtatgacacgctgttgtcatacttctttttttataattatctcgtaaggtaacccaatctaccccaaattaaaggagacgatcatcaatgaatcatccggtacaaatgtataattatcacgcatgggccaaccaaaccatcctgagcagaatcaaggaactgcccttttccgtactgagtcaggaagtgaatagttcgtttccaaccatcgctcatgcactcagccatatctatgcagtagataagatgtggtacctggtgttaaccggcacaggtatgcccgaggcactgcaagcatgcatacctctaaatagtgaacttcacggttctgtgggtgaatacattcaatcttttaacgacctgtcggcaaaatacagtgagtggttccaaggccaagatgatctggaacaaaccgttctgctcgataatccatttgccggagttcgcgaaaccagcttatcggaaatgatattccatctggtaaatcacgggacctaccaccggggcaatgtatctactatgctgcgtcaattggagcacgcctccatcatgaacgactattctctattctggtaccaagaaccggctcaagtatagacaacgattcgatggaaaatgtacattgtatccccgtgacatcgagggatgaattgagaaattggttgcaagagcacggaaaagtccagaaattttgctgggtcatcgtaagcatgaaaccaactccgggtaccctgctgtacttggacgtggttgaagagtcgctgtgctttggatggatcgatggaatcaaaaagaaaatatccgagacccaattagcacagagattgtctcctcgaagccaacgaagctcttggactgaattgaacaaggaacgtgtccgccgtcttgaaaagttgggcttcatgcatgacgaaggtagaaaggttcttcctgttatggacccgaatgctttcattatcgatggtgtaatcgaacaaaggctgaaagaggatcagcaggtttatgcgaatttcatcgccttccctgctctgtatcaaaagattcggatcgatacgatccaaagtgtgaaacagcagcccgcattattccagagtcgattggacaaattcataaccaatacgaaggaaaataaaatgtacggtcagtggcatgataacggacggcttttggattattagagtgtctctgaaaaacattaaacaggacttccctatgcggaggccctgttttgttgtttcccatattaatgattttgcctgtatgttttgggagacttgccataggctttcttgaattgacgggtgaaataattactgtcgttaaatccgcattcatatgaaatttccgtaatggacaggttcccgtttttcaataaatgacatgccttttccagacgcaacttctgcagataagagatcggagtcatctgataataggatcgaaaaatccgattcagatgccttatcgagatgttcgacttccccgcaatgtcctccagcgacaatggctccagataatgatcttcaatatatgaaatggcattcgccagatgcatcagattgttgccctcaatgcccttttcctgcgtatcatattgcctcgacaaatatacaaccatctccgttagacgtgagatcaacatcgtctgatagccttgctgtttactgtgatactcctcaatcatgaacgatatcaacgattcgacatactccagactggaaatggataacgccagtttactcggaaatgagtgggtattgcgatagaacggttccaaaacaaacagtgcctggaagccgttggatttcctgagatcaggcccagccgaagcaagcatctcgggactgaacatcacgttacagatcctaaaatcatgagggtctttatacgcatgatgggtgtcaccattgatgacaaacgcgtttccttttttaataaaaaattcctcggtgttcaccacatgagttgcatgaccattcagaacaatcacaagttccgtaaaatccatatgattatgaagctccatgtcctcaacgtgtccaccatactgaatgaaaaacggaaattgttgatgatctgaagtaaaccatctcaaataggcattactcaaaagcattcccctccacgaacattgttgggctgaatgtctatatcatgctattccaggaccgaaaaatcaaggtttaatatccttaaaaccgttataattcgccttgtagcaaggattctctaacatgtccagattcgtactaaactctcacaatgaataggagcataacatgatgaaatataccaatccggtcattccgggtttttatcccgatccaagcatctgtcgtgtagacgaagactactatctggtgaccagtacctttgaatattttccgggtgtgcctatttttcatagtaaagaccttgtgaactggcgacagatcggccatgtccttactaccacagaacagctccctctagcgaacgcgggcagctctggcggcatttatgctccaacactccggtatcatgatggctggttctatatgacaacaaccaatgtcagcggcggcggaaatttttatgtacgtagtgcccagcccgagggaccatggtctgctccgatttttgttgatcaggacggcatagatccctctttcctctttgatgatgatggacgtatatactttcaaacggcttgtaatggcaatgaaggcgaaggcatctatcagtgcgagataaacatcactaccggagccagactgaccaatagtcgattgatctggacgggaaccggaggagcagcccccgaggccccccacttgtacaaaataaacggcctctactatctcatgatcgccgaaggtggaaccgagtatggtcatatggagaccattgctcgaagtgcaaatccatacggaccatttgatccgtgtcctcataatccgattctgtccaatcgcagcatgaaatccagtatccatgcaaccgggcatgcagaccttgtccagattcaggatggaagctggtgggctgtatgtctgggccttcgtccagcaggttaccccatgcggcaccatctgggacgcgaaacgttcctggcacctgtcacgtggacggatgacggttggccgatgatcggtgtggacggacatattgagccggagatgactggcccttcgttgcctgaacacccctggtcgcatcaggctatccgggatcattttgacgaatcaactttggacatgaactggatcttcctgcgcaacccggctccggatagttggacgctcacagaaattcccgggcaactcatcctgcggggtcatccggtttcgctcgatgatggaagaaatccatcctttgtcgggcgtcgattgagccatttcttatgtaacatggcgaccgaactgcattatgagccaagtgcaagcggcggtgaagcgggtttaaccgtacttatgaataataaatatcattatgacttggctgtaacacggatcgacggccagaagaaaatcatactacggcgaactgtcggttctctacgaacggtacagatgcttgactgtgagaagggtccggttgttttacagatcaaggccgaacgtaatcactttacgttcctctaccagcaaggctcatccgatgccattgaagtaggttcaggtgaaacccatctgttatctaccgaagtagcaagtggtttcacaggtgttattgtagccatgtatgcctacgatccatcaggggaacgcacccctgcaggtttcgattggttcgactatgaacctctggaagaattatcattctaactcctatatttaataatagaaaatataatatatgatcagctaaaatttatccccttaaagtagacactctctgaaaagccttatgtggtagcataaggaaatgagtgaacttcgaggggattttgctatcgttatatctttctttataattgctctgaaatttataaaagaaccattgctttattagagaagttctcctagtatttttagaaggaacaccccagcagctcccatcttggcaataccttcactgtccatatgagagcgctatcgctgcagcacgaaagataaacgggaggttgcagatatgaaatggaatcacttcaagtccaagcttctgcttaagtacacactatcctatatctccattttccttatccctcttgttattttaaccatcattatttatcacaacgctgtggacacgctccgttcagagattgaacagaccaatgtcaaccagctcactcaagccaaaactgtcattgatgatcgcatgaaggaactgcaagacatcgcgtttcgcatcgcctacgatgagcagttaacgcggtattggacccaccatccgtactatagccgagaatcgattggcgcattggtcaaatacaaagccaccagttccattattgatgagctgttcctattcttccgaggagatgataacatctactcttctcaaggctctgaaaatctgaatgtatttactggccgctacaaatttaatacatggaatgaagcggacatgatccaggatttgaataacgttccgtttcccacgatacgaccggcggagcaggtcgttcaaggaaccaaaatacccaactccatgctggcctaccttgtaccgattgcgcctaacaatacgcccgcccatggaaccgtcatgtacctgattcacgagtctaacctgaccggattgattgattccattctcagcgactaccatgggatgacttatattttcgataattttgggcaggtactagccgccaattataagggggaaactattaccgaacaggaagtcaaatctctgtttgcacttgagccaggaacgcacagcctctccttgaatcaagaaccgcattcagttgtatccgtcaaatcagatgctggctggacttatgtaaccgctatgcccagcaaccaattttttagccggatcgttcatattcgcacctttgttgttcttgttttctccttcatggtggtgatgggcacgttcctcgctattatgttggcccgaagacaataccatccgatttcagacttaatggagttcattcggttgaaaaatgatcctgatccatcctcaaccaccaatgagctagaatggatcaagaaaacactacacgattatagtcagcgcgtagatcttcaggagccctatgctcgtaatcatattttgcttatgttgctgaagcacggtcataccggagatttcccctctgagtttacggacaagttcggcatacacttcaaccgatcccattactttgtcatgatcatgggctgggaaatgcatgcttttcctatgggtgataaccctgaacaacgaactgtcatgcaactgatgaacgatgtggaactgccggagatctctgctaatgcatacggtgtggagcttcctcaagcagaccaattggccctcatcgtcggatttaataccgaaatcggacatgaatccagcttgaatgctcgtatggagtctattgttgaatcactacaatcgatggttgcagatcacgtcggagtcgctcccgcgattgggattggcaacagctacagttctccattacagctgaaccaatcctacatcgaggcatcaaccgcgctggaagcgtccatgctgcacggacaaggcagcaacaccttcttcaacgccctttccggctctagtgaacaggattcttccttctgggtccctaaagatgtactgctgaagctggtccagagcttaaaacagggtagctatgatgtggcggttcagatggtgtcgaccgcgttaaacaacctgaaagccgaaatgccgtcggtaccactgctgcgttgcatatgctttgatattctgaatactatgctaaaaaccgcctcagagcttgggatgcatcatgtggttaatcagctcccaagaatcacatcctatgactcactggaggatttggagaaaaaactggcaggtcttgccgccgaaatctgcgcccatgtcgaggcgaagagcgaaacagaagaaagctccctgatggatgaaattgttgcttatatcgatgccaatttctctgattatgacctcagtctgggtacgatctcatcgaaattcacgatctcttcatcgtatttcagccgttcattcaaagaaaagatcggtatgaattttacccaatacatttggcagaaaaggatggatgaagtcatccgactactgctgcatacaaccgatccgttaaaagatatcatcacgcgtgtcggttacctggatacaccaaacttcatccgcaaattcaagaaagagacgggttacacacccggacagtaccgtaaaatgcaccgtcccaacggctccgccgattccccggatgatgatgacgaggaatgtattggctaaatggagcatcgtctctgtgatggttacatctcagaacagtaaacagtgtatatgagagcgaataacatcatgagatcaaaacaacgcaaacaaggagccgtcctatacgtcatgcacatgacgtataggacggctccttcgtatgtttttagtccatatacatcatctgacccgtcggctccctgaggtgtttatcctattttcccagccggaagatcctgcagcccttgatgtatagcacccagcagacggcgggtcggatcacagccgtactcccagaacatgattccggccagaccttgttcctttacgtaatcacatttgcattggatcgactcttcatcatcataagatatgaggctggacccattaaacagaaacggtgcacaggcttcttcatcccaataacgagtgtaaccattcttgttaatgtacttcgcttccagctctgcatacgacggaccatagcctcctgtgctgccagccatttgatatagcccacggtttcgatcaggaacttcagtccagattcgggaatagaacgcagcaccgatcacaattttctccttcggaacgccagcgcgaacaaacaggttcacagaagcatccgtactgattcgaaacaaatctcctgttggcgtgtacagattcgtatgatgtccggtcagaacctgaaaaccgccgcgcatatcataggtcatcaactggacgtaatcgaggtactgctgcactttagccatctctgtaccgtccacgtagtattggtcagcccctgccgcaatggtgagcagataatgacgaccatcctcggctcccttggcatccagtgactcccgcatcgtcttgagtaacaaggtaaaattccgtttatcatcaggactggatgtgataccagcttcaccataacaaggatactcccagtccagatcgatcccgtcaaaagggtattcctccagcacccttaccgctgatgcagccatgctgtccctccccggctgggttgaggcggcctctgagaaacctccagcgctccatccgccaacagacagcagtaccgtaagatttggatgctcccgcttcatgttctggataacatgaccgttctttaaatgctcagtggtgatttcatcattcttaacatgtccgaaggctacgttcagatgcgttaacttcaacagatcctcatgtgtcatgttgggaagaactgaatccacggcataacctacagcaatatatttcgtcattctcttagctccaatccgttcgatgattgagatatcgcagcagcaatctgcagggcttccttcccggtaccaatcttgtacccggatgccgaataccgaatttgatactgtgtatccagcacgaacagatgcggataacccgcttcgtgggccgcaggctttgaaatgaaatccgacaaggaagcataactggaatctcgtacaaaaaccgtgcgtacaggcagctttggataaccagcagggtcaaaggcagcgttccattccacatctccgatgatgagtacgatgggtatacccagcttatccagtggctctgccagctcgcaaagttcacgaagcagatgtttggtcggttcacgctccggttcaatccaggcagcaatggcaccctccgatcccagaagttcctccagctctacctctgaaccattcagacgggtcagtatgcttcctggtaccagtttacccagtacaggaatatcaacctcagtctcgcgataagtcaatacaacctccgttgtatctccggtgttcacggtaaagtaaacgaagcgcacgtttaccgttccatctttcaggcgaatgcctgtcgttaagcgataagcgcctggttcaacctcatatggctcgctatagacatccgtactgccataaggataaatcaacgtcttgtagacgccaccttccagacgggcaaacgagaaattttcgaaataagatgcttcaggtgtatcctgcggagcctttatatccttacgaagttggagcattccccagcttgtgctctcctgagtttgagttgatgtgagactaaacgcatcctcccagcctctgtcacttaggtactgtggtttctgtgcactcggatgtaatcgtgccggaatacccaaactgcggcatacggccacaaacaaaatatccagcgactgagcgtcccccttcatcagactaaacgtcccgatcggattccccttgccttttagattaggaagatcttcatagtattcgtattcctgttccagcatttggagaagcatcgcaggattttccctgaacgtcactacctcctctgccgaaaaggcattctggaatacgcctcgataaggaaccagcatctcataggaaatccgcggacataggatgtatctcacgaacgtatcttcagaccatgatccttgctgtgagagtgcaccgactagatgatcatccagcgtctggcgaaaggtatcaattaaatctttttcattcatcgactccagcaaccggagcggccattcaccgtatgaattggaccgttcctctaggaatgctgcaatttcacgactattcccccttgctttctcgagaatagcccatacacgtactgagggcagtccaaccactttagccagcgagaccgcttcctcctcactcaggaatgtgtcttcatactcgctccgggtctgcgccccttcctccagacgacgattgtgaatccggatcttctcttccggtaatgcaatcacaacctctccctccccttccggaggaggaaccatatcaaaatctgtgatccctgtgggctgctctgacgagtccaatacaagctctacaagatcgctttcctgagccttgaataggatttcactccacttgccaccactgaccgcacgaatcataaggtcaccataacctgtcttaaaagcagcttccccttgtgcgtccgtgctaatttcggcaatcggatagaattcagccgaattgtacaactcaaagcggacactcgctccggttacaggctctccctgctcatttttcaccttcacaccaatgacccgcgtcggcgcataattctcaagcaaattgatttcggtaaatcccttctccgagagcgtaatatcctctggtccgggatagtcggcatagatcctcgtattaattagcatggccctgcgggctggtgggctgaaccacccttgattcagacgggcttccggctcgcatgctccgatgtagtaccattgaccatctgcccaggcttccacccaagcatgattgctgtcaccgtgagcccagcgcggcgtgtagacctgacgggctggtatgccgatgctgcgaagagcggccactgccagcgtggattcttcgccgcatcgtccgcgagcattacggatcatcgtcagcggcgatatcgtgcgcagatcgctgccgatataggtcgctttttcatgacaccagtaattggtttccaaaatggcatcggtcatggataacttctctgtccgctcggctaattcgtcatacatcaagccgcgaaaatcttcaatattttctgtatttatccgatagggtaacacaaaatgaaggaacagatgatcgggaacgcgatctccccaaggcacacgtttgcgggtgtccaaagcccggcgcacatgactcaagaacaggtccccgttatgatcagccatgtcgtttaccggcatgtaggcatacacatacttcaatgcccaggtctcttcttcggttaggttctgttgaaaaatatcaaacaactccgatttgcgggcctctgcaaaacgcaccttctcctggaacttctgctcgatcctctccaatgactgtgcatcaagggaaaataccaaggtttggctggtcattgtcctctcactccttccacagctttccgtcttcccgaatacagattaaggtagcgccgtccgaggaaggcgtactaatctggaataggctacgggttgtttcaattacaggctggcaaatcaatgactcctcacccataagcagcttcaaattctgtgtaaattcaccatgggtttcataataattgcgttctcggtaatagagcctgcgaagctcccatttaattcgctcgtcttccggcatctcgaatgactgattggttccgtcatccgagaatacgacatagccccacaactccgggtaatgcatgttgataatgcccataggtgaccacacccagttgtcttccggataaggtttgcccgtatctggattcagcaccttgcggtactcgtcgccctgcacctcggtctgccactccacgcgtgagaagttgacgcgccagaactcacccggcgcaggcggacgttttccttcggcgcactcctgtagactggtccagggaattgcgacctcgatgctccattttcggttatcggctccaggtgtgttcagctccccatcgatatgtacagctgtcttaagaccgctgatatcccacccattgaccggaggtccgccatcccgatacggcttcaccaatagcaggtcccataccgtattgagtgcattgatctcgaactcataatattgatgggaatccccgtcgggatcgataaaaatttcaaagtcattgtcatagaaaataacggaatcacgctcggtcaacgtagcccatatctgatcttcaatcagctcggcagcaaaatagaaatagtcgtcatcccacagcattttgacccgtgtctgtttccctggcttcggacgaagatccccttcgatatcaacgaaatcatccgtccaaggggccgcatcccaaaatgccttatctacacggccgtctaagaccagcggttcctgcgcacgattgcatatataatgtttgggagcatactcaatcctgggttccggcactccacttctgttcatttcgctctctccaattcgtaagggagggcatgcatctatcagcgcacaccctccctgtaatggttagttatgggtgacaacggctccagagccgccatacatttccagctcctcatcgaattcgagcttaagaacggtcacctgttcatgtgtatcctccggggtcatcttaatccacgttgttcccgggatattgaaccaaggcacgcccccatgaatctcatgatgcagctctttgcccgaatgcagcacggtaattttcttgatcggattgcagagacctttgatgcacacattctcttttggcttgtcatacacaaataggtacaatgtctttctgtcctttgatacggtgcttccccccaaatagtagcgaggcataataccttctcccgtcccgaaaacagcctcctcatggatccgaatccatgttcccagcccaagcaggatgtcctcctgcctctgatcgatggtcccgtcttcacgcgggccgatatccagtaacatatttccgcccatcgaaatacaatcacaaaacattcgaatgatctgattaagtgatttatatttatgatctgttggcacataaccccaagatgtgttgatcgtggtacagaattcccagggtccctctggtcttgtaatcggaatgccctgctccggcgtcttgtaatctccataaccctgcagacgggagttgatgatgatatccgggttgaaggattgcaggtaatgcttgaagtccggcagattccactgctgggcacttcgttcccagtccccatcgaaccacagcagatccacttttccgtaattcgtcaaaatctcttccagttgatggttattgaattgcaggaacttctgccatttctcctcatcctgaacgccgtccacaggacttgagtgccggttgacactgctgaggtcctccggtacttttccaccttcatatacgctgggataatccgggtgcgaccaatcgatcagcgaaaagtacatccccagatgaatgcccttctcccgaatcgcttctgcatattccctcacgatatcccgattcgcgggtgtctgtttgacgacattgaggtcactatactgcgtatcccatagagcaacaccatcatgatgcttcgttgtcagcacggcatagcgggctccagacttttcaatcaagtccgcccacttctccgcattgaatgccgatgccgtaaacccatccaactgcttcatatattcatcataggagatccttccattatagaaagaccaggattccgcaaccccatccacagcatagatgccatagtgaatgaatatccccagtttggcttcttcaaaccatttctgcatatctgcccacaccctcccctgagaattcatatatgagaaaaatcattgaacctaaccattgtccttcttcatgggatatatattgacagacttttttattggccggtattccagcgatcatatgccccctgatacagttcgatgatacggtcgctgcccattttcttcagctgcgcaatgtatttatcccagttctcaagcggttcctggcctgttacaaacttcgcttccatctgcttaacgtacgtatccagatcagacagtaaggccgtcgcttcgctttgctcttcattcgttaaatacacgttaggaaatggagcttttccgataggtaccaacttctcttgattttgctggtcaatccactcatcaaattcggtacgaagccctttcgctacctccggatcattaatgcccggtgtcaagataccaaagttcggcgtgattttaccccggtactcctcacgatcaccgccgccaggaacagggagccactcttttacgtgattttccttgtctttgaattgccacagcacgccttcaggaccttgattgaacagggtcgctccttcgtaactgtatatatagtcgatccagcgcatcgtcgcctcaggggacgggttgctgctcgtaatagcaaaggtaccgcgagccgacatccccggatgcttgccgtatacaggagagtctgcaacctcgctcttcacgggcgtcatcagcggatgttccgtgctaggttcacctccgagcgtgaagtacggatggtaatcgttgaacagcgcaagtttgttactttcaccttttgctttcttctgatcgcctgtttgtgagaaggtctcatgatccagcaaatcttccttccacaagcggttcatgaatgtcagataacctttgtaaccttcttcttgataaggatagtgaacttttccgtctttatcggaatagatcccttcgttgtacattccccagaagccgaagaaaaacatgcgaagatcatccagttttacagaagtaagcggaatttcatcttgctggccattgccattagggtcttcttctttgacacgcttaagatacgtatacaattcttccgtagtcttgggctcatctacattaagcgcctttaggaattccccgttgtaccacatcgggcctctgtaccacacagctgccgtgtcaatgaatgggagtgcatacatatgcccatcaggcgttgtaaatgatttacggacatccgggttctcatcgaggatcttttttatattgggtgcataaccttcgtcaatgtatttttccaatgggatcagaatcccctggctgccataagttacttgctccgctggtttgagatctgcagcatagaacatatccggcaagtccccgctcgcaaaaaccagatttttcttcgtttcaaagctgtcgatcggtgaaagctggtattccagcttgatgcctgacagtttctccatttcttgcagcacaggcatcgtgctccaatcagctacacccgcatcctgggacataaccttcaacgttagcgtttcatctacaatggggaagccttcttttttgaccccctcaaccttggaggttgagcttccgtcttcattggttgaaccacaagctgcaagcaatgttgcgaataaggtgagacagagtgtaatggatgaagccttgtgaagctttttcatgacaacaactccccttgtttaatgtggtatatggattaagatcatcccttaacggaaccgatcataacaccctggacaaagtaacgttggagaaatggatataccgcaatgaccggtagtgtggcaacaataatgacggcatatttaaccaacgcagcaatctccgctttggtattcatcgccgttgctgatgaggtatcaatcgcgcctcccccttgagccgccatttcctgaagcaccagaatctggcgcagaaagagctgcaacggatacttggaggaatcgttcagatagatcatggcactgaaatagctgttccagtgtccaactccgtagaaaagcgccatcactgcaatgattggcatggaaagcgggagcacgattttgatgaacaaccgggtgttggtacacccatcaatatgtgccgcttcctgcagttccttgggaatggtcgattggaagaacgtacggcatacgataatattccagatggatgcagctcctggcagaataagtgcccacatgctgttgaccatgccaagatccttaaccagcaagtaactcgggacaagccctccgctgaagaacatcgttaccataaacattgccatgaagaaacctcgtcccacaaaatccgagcgactaagcgcataggctgctggtagcgtgacaatcaggttgacgatcgtacctacgacggtgtagataattgtatttttgtacccaatccagatgttggtgttctcgaacacccgggcatagccttcaaacgttatccctttcggaagcagccacatctcaccggagcttacgtatttgggatcactgattgaagcactgatgatgtatagcagcggatacaacacaatgacgagcgctatcgtcagatagatgtaattgcacaataagaataatttatcgcttctgctttctttcactgcggttgacatgtgttttcccctccttttaccacaggctgttttcactggtccgacgtgcaatctgattcacggtaataagcagaattgcattaactacggagttgaacaatcccaccgccgtagagaaactgtactgcgcatcgaccagaccggaccgatagacaaatgttgagatgacgtctgacgagcccatgttcagcggattttgcagcagcaggattttctcgaatccgacgcccagaatactgcccatattcaaaattaacaagatggtgattgtagggatgatcgctggaatgttaatatgcaaaatccgtttaaaccggctcgcaccatctaccacagccgcttcatgtagttgcgggtccacacccgatagagcggcaaggtatataatggtgccccaacctgcactttgccagactcccgacagtacatacactgttttgaaccacgcagggtccgtcaggaattgaggtgcctggaatccaagggcctgtaccaaattgacaatcatgcctgacgagggtgataaaaaggtaatgatcatccccgacattaccacgaccgaaatgaaatgcggtgcatacgtgacggtctgcacagtacgcttgaagaaggaatccttcacttcattgaacgctaacgccagaataatcggtagtggaaaacctatagccaactcatacaagctgatgctaagggtattccataataaatcccagaaataatacgaattgaagaaacggatgaaatgatcgaatccgacccatggacttcctgtgacaccaagggttgggataaagtttttaaatgcaatttgtatgccgtacatcggaccataatggaatatcagaaagtataaaaaggctggcgcgataaacagatacaactcccagtttcgaatcgtccttctccataatttatttttcttactgctcggattggtgtataccgataagttttgcgataaggcggacttcccatctggttgcatcagttgtttcctccttttttggtaacgcttacataccgagtttatggttcattgcctaatccgtaaatatgccatttcaatcttcacttctaaaatcacggaatatactgttacaacaggggtttacacttttgttgccagcttgtcattgtcatttcgggggtataaaacatgtagaatttgacccatttccctcctgtagttgtcattgagagtttcatcacatgaacttgaaagatgtcagatccgaacttaggttagaaaacagtccttaaagtcaaaacccacatatacgcattggacacggtattgatgtttacaagcatcatactgaattctacggtttgcaggcttcaaggttttaccgatgtgatacaatgtaatattatctatcatacatctttcgcacactacaagcctgtaatggcttgcctttattctatatttctcctccctctttcgtatatatgttgtttttatctttaccttcaggatacataaacgcttataaacactggaaatatggaatcatatatgtagattttgcacaaggtgtggaatctgaaaacagtagatatttcggaaaagaccattaaaaaaagccattccgctaacacgaactggctttacatcctaagtagatatccatttctttataaaaaatcggcaggattaattacactaaatgtaatataaatgatcatatgcaaacctgtgtactgttttaactcaaataaaaaacgactctccatacatgtatggagagtcgttttgaagatacacatccgtttcaaccatgttcagtttgtagggtttgcagtgaatttacttgccagaaggttgagcttctgctgtataccctgttgggatatccgtttctgcagtcacattggtgataaccattggatacatcatgtccggatcaggttgaataatggaatagagcacgatggcgcgtccatccttctccaatttcacatcatcaatcttcaatccataaccagggtgcggcatttcagcactgagtttaactttggttgttttgtcatcaaccttggtcgttgttacttcaggtacaatcgcttgttggccttcacctggattggttggagttggctctgctgagccgccattgccgtgtttatccacaaattcaagtgcattgaagatcatgcttgcagcctccatacgggtaagcgactgatctggacggaaattcccgtccttatccagttcaatgatgttcatgttcagcaggttctggactgcagatacggcgtccttaccgattttattttcgtccttaacaagattatacttcatgatgaccggataattcccggttgtgttaatcccttcattcagcaaaatgacaaacagttcacgtgtcatcttgccctgcgggttcacttccaccggaatggacagtccattctgagtagcggcctgcaccgcatcggcataccacgtatccggactgattttattctgagcggatgcttccgcaaattcatttttcagaccaaatgcattcacaatcagttgaacaccctgtggctcggacaatgcaagatctggacggaacagatccgccgttactccgttaacaatgccttttgatttcaaagaatccacaaccgacttctgaccttcatccttcacatctgtgaaagcaaataccgatgcacctcctgctgtcaaagaaacgcagagcgcaagtgttgcagccaatccttttttatgtttcatttcctggcacctccatatgattagtaaagcctatttttaacctcttcattcctacagacggggcatccctagaaaatgtttcagtaatttcgacatctggtgaatacaacacgagaacacggcatagaacccttctccaacgccgataatccgatcacctgctttttgctaactggcttcgttgacattgattcggattagcgcaaaaataagaatagagaaatctatcggatgacggataaacaacgaactggatcgcatacagtaagagggcacgacgcgctaataacaggtgtcggcccttttcttgactccacctgcctgaactgacttcacctataacaaaaggagaacaacgcttatgtccaagaaaggattacttcgcggttatgttgtgtcgaactggcctgtttatctggttgctgttcttctgattattgcctccaatgtcgggcaagcatccctgccccgcatactcggcagcttcacggatcagttgatgcagaactctcttcagatgcagacggtcgtaaggtacagcctgtcccttctggctattgccatcgggtataatctgctgttcggtaccgggcaattcatgattatgaagctgggtcgacgcttcgaattcatgacgcgtgagcgtatattcagtaagttttccgaacttagcgaacattatttctccaaacaggggaacggaaagctgctcagttatgtcatgaatgacgtgacttccgtacgtgaagcgatatccaatggcgtgacgctcatgaccaatgccaccttcctgttgttgtcctgcattgtcatgatgctgcttagcgggattccgttgaccctcattctaatcagtgttgttcctttgctggcaattccatttctggtcgtgttttttggtccacggattcgcaagcgctctcgcgacgtgcaggaagctcttgcaaccatgacggaatcggcggaagagcagctgggtggcatccgcgtaaccaagacgtttgccattgaagacagtgctcgtgcacgctttggaactaccgtcgatgcaatcaagagcaaacagcttcgactggttcgtctgtcttcgttgtttcaggctttgctcccgctgctgggagctatctcattggtcgtttctctgcttgtcggaggtattatgaccatgcagaattctattacactcgggagttttgtcgccttaaccttatatctgcgcatgatcatgggaccgcttcaacagatcggcaatgttattaataccgttcagcgctcaggcgcatcactggagcgggtgaatgacctgctcagcgaagtagcggatgtacgtgaacttcctgaagccacagcgctccaaaccgtacaagatatcaccatggagaatctaaccttctcctatcctggcagttcatctcctgctctcaaaaacattcaactccatatccgtgccgggcgaacggtcggtattgtagggaagaccggctcaggtaaaagtaccctcgttaagctattgctgcgtacatatgaaccacctgaaggaacaattcgcatcaatggtaccgatattcggcagctgtcgctggaaagtctaagatcgcgcatcgcttatgtccctcaggatggattcctgtttagtaccaccatccgagataacatcgcatttagcgaccgggaagtatcgctggatacagtggaacatagtgcacggcaagccatgatctatgataatattgtccgttttcctgatcgctttgatacactgcttggcgaacgtggactcacactgtctggtggacagcgtcagcgaaccagccttgcaagaggactgatcaaacaagcacagttacttattctggatgacagcatgagcgcggttgatgctgtcaccgagagtggtattctgcgcagtctgcgcgagatcggtaagggcaagactacattaatcatctctcatcgcatcagcgcggtccgtcatgcggacgatattatcgttctggatgaagggcgagtcgctgaacagggaacacatgcgcagttgatggctgccaaggggttatatgcggccacttaccgtttgcaggaggagggattacatcatgtctaacgctaaccctgaacttcgcccagatgcagaagacgatcagagtaaaagaacttcgtttaaggccatgatggcatacgccaaaccgcataaatgggcatttgccggtatcttcttctgctcactgcttggcatatcggcagatctgctgcaaccctatctggtgaagatcgccatcgatgatcatctggccgtgggccagaccagtgtgggctttctcgttcagctcgcagccatctttcttgggctggctgtcatcagttttatttttacctatatccaaaataatctgttgcagcatgtgggtcagaacattgtatcccggatcagaaaggacctgttcaagcatatctccaagatgtccatgtccttctttgaccgttttcatatcggcagtctggtcacaaacgtatccagtgatacggagaccatcagcagctttttcactcaagtactgctcagtctgattcgggatggtatgatgctggtgctcattatcgtttttatgttccaacttgatcctgtgctggcgacatactccctgatcgtgctacctgtcattgccgttgttgcagtgttattccgtagtcgactgcggaaagcttatcaaaatgcccgtacgcgtctttcccgtctgatcgcttttacggcggagaacctgtccggcatgttcctgattcaggcttttcaccaggaggaagaacagaagaaacgtttctcggaacagaactcactacacttgaaagccaatattgctcaagcccgttccaatgtcatcttcaaccggacgtttgatatccttggcaatgcagcactggtcatgatggtctggcttggaggtcgcgccgttcttggtgaatccctgcaagtcggggtattatatgcatttatcagctatatccgtcagttctttcaaccgattaaccagattacgatgcaatggaatacattccagtccacgaccgtatcgatggatcgcatctggaacattctgaatacacggcctgaagttgctgatcccaaacccgggatggcctcttcgcttgaaccacaaaatgtgatgggccagattgattttaatgatgtgtcgtttggttatcgggcagaccggcctttgatccaacagatgaacctgcacctctatccgggtgaaatggtaggtatcgtgggaacaacaggcgctggtaaaagtacactgatctccctgctcaatcgtttctatgatgtagacaagggcagtatcgagattgatggtaccgatatccggcatctgccgcaggctaagcttcatcggatcgtgggtctgattcaacaggaacccttcctgttctccggttccattattgataatgtgaggatgtttcgtgaggatattacgcgagagcaggcgattgaggcctgccggtttgtcggggcacatgcgatgatttcacgtttgccacaaggatatgatacacatctatccgaacgcggaagcggactatccgctggggagcggcagttgatttcatttgcccgaatcgtggtgttccagccccgagtactcatcctggatgaggcaaccgccaatctggactcacacacggaacagcttgtgcagcaggcgctggaatcggtatcccagggacgcaccaccattgtcattgctcatcgcctgtccacagtgatgcatgccgatcgaattctggtgatggagaatggcgagattgtggaggaaggaccacaccaggaactaatcgcagccaaaggtgtatatgcagacttgtacacccacgcgcgtgatgcaggtaaaaattcagctatatcagggtaatgaacctgagttatagtaaatacagaacgttgaacatgccgctctgcttatgcaggcggcacgtttggcatatcgatcagcattgtaattaggaggaacatctatgcaacaacccgaaacacccaagcgtgaccatcagcagattcgttaccaacgcagcacagctctatggaaaggaagtttatgcttcctgttccttctcttgtgcgtgagcttattatggatcatcgtggacggacaagccgaaagactggagaccatatactattccattgcagccgtgctgggtatgtggttgatcggaccgctattcttcatgtttgtgtcacgactaaccaaaacccctgccgtgttgttatcctgggatgatgatgcgttgagcacgggcaaacggaagattccatggagcaagattcgcaaagtcgaactcgcctcacctgcccgcagcaagtggctcctgtctgcttctcccatgtttgtcctgtacttaaaggacggcacacggtctcatattcagacagatcatctcctgagcaaaaaagagctgaaccaggcggtgtccttacttcaggagactttgcaggaacagaaacaggatcgttgagtaccgggatggatgaggacaagctccccacatatcactgtgatttctctatacctatagacaggctgactttgtaattgccgtaaggtaacaacgcttcaagcagttggccaagctgctctgtggtgccagtctgcactctcatcagatagcagccttctccactgacgcgatggacttcaacgatgtcctcacgttcagcaatgaatgtacgaaaggcggcatgtctgtcgccggagttcaagaaaactgtgacaaaggcctgtaggccgaggccaaggcgttccgggttccattttaccgtgtacccttcgattacacccagatcttgcaacttgcgcactcttgcaccaaccgcctgtcccgtgagatgaacctcttcaccgatctctttgtgagaacgtttggcatcctgaatcagaatctgcaaaatacgtatatccgtgtcatctatcatttcattcatcttgcttcagcaatcctttcacggtgaaattagcgtggcctaattccattcatcatgttatgtacgccgttaaacgggttgtataccatatagggtaatactattaaacaactcgaaggagtgcaaatataatgaaaatccaattgattcgcaatgctacactgtggctggaatacggagggctgaacattctcgttgatccgatgctgatggacgtcgaagtcatgcctgcattcccgaacacaccgaatgagctacgtaacccgagagtcggtctgcccgaaaccgaaacggattatctgaatccggatctgttgattgtgacacacacccatgtggaccactgggatgaatccgcggcgaaacaacttggcaaagacattcctctgatctgccagcctggggatgagaatgtatttctgggtgccggattcacgaatgtaacagctgtagatgaaaaacatgagcatcactctgtccgatttgcccgcacatccgggcatcatggcacaggtgaaatcggtgaacgtatgggcaaggtgtccggtttcgtacttgaagcagatggagaacctgtcacctatattgcgggggatacgatctggtgtgaagaacctgctgaggccatccgccaatatacgcctgaagttattgtcgtgaatgccggaggtgcacgcttcgtggagggtgatcccattacgatggacggccctgacgttgtcgctgtgaagcgccatgcgccgtctgctcatgtcatcgctgtgcacatggatgcgattaaccattgtgtgatgtctcgtacggatcttgcgacttttctggcatccgagcagttggatggtcaggtgctcatcccacgtgacggtgaaagttttgagttttaagttgaagcggaagctacgctgaatcaaagcggaagagaaataaacttttcacacaggtgggtggattgtaacgaactcagcacacgttattagtctgttttcagttaatctgatattctaacgaatcctagacaccttatttccgctctgggcatgcttttcccgagattcatccatctttttgccaggataacgtgtctccgattcgttaaatttctaatatagcaataatcggcacaataaggtgtcctagattcgttagcgcgtatgcgtatgataggactgtgcacttcattttcaacacacgccgttacctaacttatatgctatcttgtctgccacatcatcactcatgtcccccatgccttccctttccctataaaatataacggaaaaagctggatgcgatgaactcgcacccagcttttttggattcaaggaacacgctgatcctctgatccgctgttcgctggcttccctttcaggcgcatcatgcctgccattgcgccctcacgtgtcccatccctttatgctaatccattactgaactttcaaacgaatcacgttccatgatgcttttgccaagctcgccgtaatcagagtatcagatacaactgcacccccgcgattatgaggagcaacgcggtttggttgtgctgccgtattagatgctttgagatcatcactttccagcacgatatgctcgatcacggtacacttcccgaagctgcgcaggtccacttcgagcggaagggattcttccagatgacggttgactgcgaatacagtcacttcaccctgctcttcgttatgaaccgcaatagcttccagataagggacatccgtgatttgttttgtatcgtattttggagactggatcaatggcaccaatgctgttccacgtccgaagagggacgtatgcatgaatggatagaagattgtctgtctccatgaaccaccgcccgtatctgtcatgatcggtgcaattacgttaacgagttgcgccagacaagccattttgacccgatccgcatgtttgagcatactgattaacatacatccaacaagcagtgcatcctcatgattgtagatatcctccagctgtggcggagcaatctgccaagggtccatcttcgaatcattttcattggagtgataccatacattccactcatcaaaggacagatacatcgtctttttgctgcgcttcttcgctttgatataatcacaagtcgccttcacggtatcgataaaacgatccatttcaagtgagcgtgccaggaacgttggcgtatcttgctcttgattgccgtagtattgatgcaaggacagatactccacgtgatcatacgtatgatccagcaccgttgcttcccattccgggaacgatggcatattcagattcgaacttccgcaggctaccagctcaatcgtcgggtccgtccacttcatgacttttgccgcttcaactgctaaccgtccatactcttctgctgttttgtgaccaatctgccaaggaccatccatctcgttgcccagacaccatgttttgatcgcatgtggctgcttgtatccatgcttgatgcgaagatcactataatacgaaccttccggatggttgctgtactccacaatgttgcgagctgcatccgtaccccgtgttcccagattgaccgccatcatcacttcagaattagcctgttttgcccagtccacgaattcgttgaagccaaattcattggtctcaatcgttctccaggccagttccagtctgcgtttgcgttctgacacaggtccaaccgaatcttcccaattgtaaccggatacaaaattacctccaggataacgtacaatcggtacattcaactccttgaccatctccagcacatccgtgcggaaaccctgttcgttcgctgatggatgccctggctcgtaaatcccgccatagacggcacgtcccagatgctcaataaatgatccgtacaagcgcttatccactacaccaatagtaaaatctttatcaaccgtcatttttgctttttccataatgaatttcaactccctaagattaatataaaaattaatttatatcctatggatcaacgttcatatttatattaaaatcgattatagccttaatttcaacctgaatcttgcaaaatgttattctttttactgaatttatgtttaacttaattctatacagataaaatggaggaacaactgtgatcagagcaaataccgatgccgaatggctacccctatatgaagcacttgccagtgaagtccgtctacagatcatccgccttgttgcagagactccgatgaatgtgaaagaccttgctgcttcactgggtctgagtagtgccatcgtgaccatgcatgtccgcaaacttcaggatgtgggcattattcagtccaaaatgatacgcaaagacggcggcacacataaaatgaacagccttgctgtagactggattggcatctccatgccgcaggaaagcgggacagcccgcaagcttcacgaggtttccgtccctgtgggacactatactcactttgacgtctatccgacatgtggtctggctacatccaatcatgttatcggacagtatgatgaccctcgttattttctcgaccccgagcggatgcatgcgcatattctgtggtttggccgtggatttgtggagtacaaaattccaaactatattttatccggacaacagatcaatgcgattgaattgtcccttgagatcggatcagaagcaccttcggtgaatccgaattggccctcggatattacattcatgctgaatggcatccgattgggggaatggacaagtcctggagattcaggcaacggacgtggcatgttcacccctgaatggtggagtgacagtgtcaatcagtacggcatgctcaaggtactgcgaattaccaatgagggtacgtttattgatggacaacatctatccgacattacactcgcagatatcccggtcgaacgcaaccaatggactcttcgtctttcggtggaggaagatgctcagcatgtaggcgggcttaccttatatggcgagggattcggcaactacaatcaggatatcctgttccggctgtactatcacgattgagttcttcaaaataataaataacaccaaaacacctcccactcgcctgtcaaaggcagaatgggaggtgttttgtatgcatatgaacatgcgtggattatttaagaaagttcttgttctaacttacagcgcactgccaccaaacaggaagcgatactcccagtgtttgccggagatatcactagttgttacaccaccgccagcgttggaatacgtatgtaataccttgccgttgcccaggtaaatccctgtgtgcgtaatggttgcgctagatttattcacgcccgaatacgatgatgcagagctgcctttatacgacatgaaatacatcagatcaccgcgtttcaggtttttccagttcgtctgaactgtacccttggcttttacatagtctccctgtttgcgggaatccgctggaagcttgatgccaagtgcatcaatgaaggcctggcgtacaaagctggaacagtcaaaagtagctgtgctgttacgactggctccgaactcataaggtgttcccaaatatttcattcccgctgcaatcactttttctacagatgcattgccggtcaccgatgtaccactattcgaacccgatccgcttgtgccgccactaatcgcttgtgtgtatttggatgaagaagatatgtagcctgtccggttagcagaatccttaatcttataccaatccgaaccggattgctgaagcaccgttaccgtttcccctttagcgaccaagcgaacaatcttcgcagaagaagaaggtgttgtgcgtaagtttacgccccaaattacttttacttgtgaattgttaacagcagctgccgatacctgtgccgttagtgctcctgtcgtcagacttcccatcagcatcgttgctgtgacacttgccgtaataatcgtttttttccagttcatgatgtcgagttccccctgatgttacagaattttaacctggcttggttctcccgggcttgccccattgtaaacgggctctccataacgttcatcagtcaaaagtcctgtattgatataggcgaacttgagcactaagtatcagggtgcgtccataatctactggaaaaattcactgctgatcccttctttttgaaaggttaaattattgtaactatttgatatgcttcattttaccgcgataaaagagttaggtcgtttctcattcaggctatatgccatatgacctagattttaatgtttaaaatcgcaaatttggtaaacattactatgattcatttgccgattaccgttcaccgaattcacatttttgcctccagccccaatacggatcgatttatcagcagtgtccgtttgattatttcgtatttcatttatgctttccataaaaaaagaaaagccagggatttctccccggcttaacctgtatgatgagtaacattactctacaatcggtcgatcaactcatttaaggttcaattccccataccttggcgccatcctgataagctgtcacttttgtccaggcactgaaggccgattgggtggaatcaaaggaataatcattcgtttgatcaaaattcgtccagttgtttttcgagaaacgtccctggatgattccggtttcggcacccgcggccaaactgccagcacctgctttgaattcaatctccagatacgtatctgccgtgcccttggccggatctatcgaaacaaaatgcccttccacgttaccactgccaatctgcgcataatcacaccagaaactcagatcagcggcactatccttggtgaaataataccggaccttcactttgctcaagtccacagcagttgtacctgtattcttcacattaaattgtggagtaatcgcattgaccgaagcccctgaactaccattacggtattgtacttcaagcgttcctgttgtaactggaggtgccaatggggtcaacaccaatacatttgaattcgtctgaccactcgtattaatggctacgactctataattataagccgtaccattcaccgctgtagcgtcggtatacgtcagtgcggtcaaacctgttgccagatcagcatatgctccggtaccaaccgaacgttgtaccttataactcgctgctccagttgatgcggtccatgtcagtaccgcctgggcattgccagctgttccagtaaggttgaatacgcctggcacaacggtacctgcgagtggtgttgcagatgcctgtgtcgacggtgcagactcacctacggcattcaccgcagtgatgacataataataagttgtgccgttggtcaagcctgtatccgtgaatgtcgatcctgtgacccctgtcgctacagacgtataaggaccaccattcaccgctgcacgtttcacagtatacgaggctgcaccagcggctgcgttccaattcagaatcacttgctcacttcctccagttgctgttacgccagcaggagcagcgggtacttccacttccggactatccgaatctccgaggagacgatcatactcgccgtacgctgtagccatatccacttgtgaccagaaccggtgatacgtgaaggtaggtgcgccgttttcccactgtttcgtggttgtgttatatgacgttttgtacagattatccaggtaagcccatgccggatcttgcttgatggctggacgcagatcggagtatccaatgtatacgccattgccacctttcgccggatcggaaggtacacctgctgtacctggaatcgtattgccttgaccaaaggttccagaccagttcgctgggatatagatctctttggcaaagaagcggaagtagtctttacgttcttcttccgtaacaatccccacaccatcattgtaatcccaagctgtatccagcaaagcctcagccaaatccttggcttcttggccttccgcgctaagtgtaccgttctctgcctgtgttccggctgcgaagaaggtcagagctttaacgtaacttcccagaactcctgtgtcctgcactggatctttggtcgttacacggaagttcggattttccgtaaacgaactgaatccattccacttgtccggttgaccctgccattcctgaccacccggaatccagaactctcccggcgccggcgttgttgctacctgaacattagttcctcccaaaatgcgctgtccagccgaattcagataatacccttgcgcatccgtcaccggacgctcacctacaaatacataatccttactccagtcgatccacttcgtgattaccttcttggccatctggaagttctcagaggtcaaatccccgctctccgcaagaatatagtacatctcggctacacgctccagcggccatgcctggaatccaaaccaggtgttggaatccggatcacgatatacaggcgcctcctgatatgccatgtcatagaatgtacttacccctgctggataagctttgtatgaaccatccagactgttcgttgctcccccgccgatggctccttcatgggattgtagccaagtgtagaattccaactgacgtttcagcgtcgcattccaatctgccttcgctgttgccgattccggaatcaagccgccagccgggtcagacaaagcataggctgcaaccgggttttgataagcctgatgggtatggctcgctccaatgcgccaagcccaatccccaccttgacccaagccacctccccaagacgtataccaagccatgagatacatgttggaatccttgcctgtgcccggagttggtgtaccgctctttgcacttccaattttctggaagtatttatcatacatgccgtagcgcagatagtcccccatcttcttcgctttatccagatattccggattgttgtatcccatctccttcgcccaatacagcacctgtactgcacgtgcatccgcatccgttgcgtttgtataacgccattgcgctgacggtacctgagtttcctttgtgaacaagctcatgaagccttcgtttgccttaccaaaagatttatcatcctgagatggatgcggaatggcttcccacacagactcctgctccccacgctggaacgtgttcacataggtagccgtatgtgatggattcaacaggtttccatatccataccagtcatccacatcgaccagccagtgcatgagataagtctgattgtcaccataggtcgccttaagttcggcatcaatcgggtctttacccgctgcatattgaccattaagtggcgatggatattgatcaggaaaaggtttttccgctgcatacgtagcagggctgttcggattgtacgagctcatcgtaggctgttcttccttgccgtcaccttcgttgaccgggataatgtatttctccatactgtcccaagctgcttccagttgggaccagtctccagtgtagtgaccatacatggtttccaaccacagccagtaactgtatgcctctgacgtcgtcatatgaccataatccggggcctcactcaacagggtctcaatggaatgatacggtagaccctctggcgaaaaatatccgttcgccggatctttcaactgatcatataattgcaaaaaccgggcttcattaatgccgtctgcctgaatctcgatggcctgatctgcggcatgtgctgtttgcggccctgcccagagtccggtgtatccggtcaacatgacggttcccgccagcatggctgttaaactttttttcgcagctgatttcaacattaatatatacctccctggaatagtggaaattgaatataagtgctgttggttttcccatgctgcttttctgcttctgacattcagccggttacggctccaagccccatactttggtgtttccctgatacccggttaccttgttccatacggcaaaagccgtcttggaagcatcataggaataatcattactttgatcgaaattactccagttatttttggaaaagcgtgtttgaatcacgccggtctctgctccagcggccaaactgcctgctccaggcttaaagctaatctccaaatacgtatctgcggtacccttcgccggattcactgcgacaaatgtaccttcaacattggccgtgcccatctcggcataatcacaccagaaggtcatttgatccgcaccatccttggtgaaataatatcggatcttcacggtactgagatcaatctcctgtgttccggtatttttcacgttgaactgcggagtcgccgcattacttgaattcccagactctccgctgcggtactgcacttcgagtgtaccagtcgtcaccggaggtgcagaaggcgtcagtgccaggacattggacagtgtctgtccgttcgcattcacagctgcaatccggtaattgtacgtggtgccattcagagctgttgtgtcggtgtaagtcaacacggacaatccggttgccacatctgcatatgtcccgcctgccaccgaacgttgtaccttatagctagtagcgcccgaggctgctgtccaggtcaggaccgactgcgcatcaccagctgtcccacttaaagtcagtgctcccggcaccgtcgaagctgcttgcggggttgccgacacctgcacagaacccgatgattcccctgctgaattcacagcagtcactacataataataagccgtcccgttggtcagtcccgtgtttgtgtaggtcaatccattaacctctgtcgcaacagttgtatatggtcctccactcacctcggaacgcttcaccgtatacgattcggccccggatacagcggcccaagtcaggttaacctgactgcttcctgctacagcctgcacgccagcaggtgcgcctggaaccgtgactggtgtaacaccaggctcctgtccatacaccttcacccctgtatcatagactggaaggtatatactcttcacaggagttcctgtggtcagcgtctggaacgaatggtcattgctggcattccatgcaccctgtgggcctgaaatgcggaactgtacttctttacgataatttccttccccacctggatagatcttggtattaccgaagttcgccgtaatggcatagatatgctgggctgtattcaccacaactggttgggataccgtcgccccctccgtataggaggttgtcacttgcacgtccgataccgtacgtccggcagcatacacttcactcaaatccaggaaatacttaaaagaaagttgatctcccattcgggcaggccaagcggaacgattattaagctgtgctctgatttccgtataattggcacctgatgatttgatcgcagcctccacaaagaactcatctcccttcacctcaggtgcagggaagttcgccaggggctgatgattctgaccaaacagcaaattcatctttgccagtgcgccggtaaaaccagcattgtaatcggttgcgacctcattactcacgtaatccccgatatcatcggtatatccatccgatgcatccgggccaccgaccatggcaccatacagaatgtggcgatggttagccgggatatcttcgttattcagccatgaactgtgagcggtccgatgatgcggatgttgaggtgcattttgcccatatccgaccacataactgctctgacgcggattatcgcccagaatataattcatctgtgagacagcaaaatcctgatatcttgactttttcacaggatcactgacccagtcggagtatacaaaagaaataaaggatgcattcgctgcatatcggagcgatccccactgatccagccacgccagacctcctggcgtatacttgactcgtgtcccattgactccaaccgtccaataatccagattgcgctcagtcgactgaataaatcttgtcgcctccggcatgttcaaactggacgtaatacgggcaagcagaatctgggcaccataatgtttactgtcccaaccttgtgtccaggtatagggccaattggctgagcctccgctagaagaccaccggtccgtagctgcaatggctttggacaagtaagcgctatcattagtagctaaataaagccatgcgccaccccatgccaactcgtcttcgtatcctgtccacgaattataaaacgctgcagcatcagtgatacaatcggtgtattccccccgatatgtatctgcgaagttgtacagctctttcgcatgttgaagcagtctggccgaatatgccggatcatcatctgcaaatacaatcgatgacgctgccagcgctgcagccgtttctgccgccagatcactgcccgggcatgaagcatcaatcttgaacgaaggacggttcatctgcatgacttctgcgggtccccaccaggcatggtcggtattacctgcccccacttgtccccataattcatttggtttcgtatgcgctttcataaaatagtcggtcgcccatcggatattatccttgatctcctccagttgtccggcctgttcatatccgtcactgtattccacgacagaccaggcgagcatcgttgcggaagcagccatcggaaaaccaaacttcacgtgatctccggcatcataccatcctccggtcagatcaacacctacatcagctccatcctgcatgcccgaattaccacgccattcgacccgattactcgctggcaacggacccgagcgctgtgcctcatagaagtaaatggccttttgtagtgcttcagcatagttctgatttccggcggccgcatccgccttacgaattcctgtgcccatcgataaactccctgccagtaatcctgccgataacgcgatcatagcgactcgtctccaccagctccccttcatgttcaactattcatctcctcttcatcaatattccgtatgcattactctggactgcaagtttatatcgctcctccccatggtgtatttcagtgtaagttccaccattaattaccattatagccgtttgtttcaccagctatataagccttggtgacttctgaaataacattgttgtgacctgctctgcgtcatgtgacaaaaaaagctgtttctctaacgcatatgcgcgttagagaaacagcttctcgcccttggtatcttcaacagtacaaatcgaatggcattctgaccaccctgtcagtatgtttctgtacaccttaggtatcagaacatctcattggttacactttgaacttgttaatctgctcctgcagttcttcggccattttggataatgaacctgcggatgatgcaatctcttccatcgaagccaactgttgctgagttgcggcagatacattatgaaccccgcccgctgcctctccggcaatgttggagatttgacttacatatcctacaacctcagttgtactcgccgacatttcctctgaacctgcagatacttcctggatttcacccgctactttgttgaccgcatccgagatctgctcgaaggcttgtcctgccgcagtaaccatctcgattcctgcttctgtctcactgctgttcactttcactgcctgaacagcatgatccgtatctttctgaatcaattgaacgagatccgtaattctttgcgcagatgtagaagattcctcagccaacttacgcacttctcccgcaactacggcgaaaccacgtccgtgctctcctgctcgtgcggcttcaatggctgcattcagtgcaagcagattggtctgccgggcaatgttgttgattacctcggtaatggttccaatctctgctgaacgttcccccagccctgtaaccaattcagtaagcgaagcaatggaattccgaacagaacccatctgttcaaccgcttgctgaataatcatatttccttcggaagattgattcgccgcatctacagcagatacggatacactctgagcaagctcggcaatctgctctgatccaagagccatctcattcatcgcctgtgaagagcgcttcacaatatccacctgatccgacgtgcctacggccagttcctcaaccgtttcggaaatctgttccgaggcttgagtattctgctccgcacttgcaagaagctcctccgatgaagcagctacctgttcggaagtcatcgacaccgattcaatcatggagcgcaaattgccactcatggtattgaaggaagccgcgagcgttcccaattcgtctttgttcttaagtacaatcgtctcacccgtcagatcaccattggcaatagccatggctgcttcattcatctttttgattggacgtgagatgatgcttgcaatgaagaaggcaataaatacagctaccaggaatgcaaaaatcgtcactgccaaaatcacattaaatgtatactccgccattacgacagactcacccgttgcggcttgcgatccttcattacctaaagtgattaacttggtgatagagtcgtttgctgtgtaccacattggataggcttcagtgtgcagtctacttgcttcttcatagttatttgcaataccgaattctatgaatgcaggcactttctccagatacgcatcataattcgtactgaaatcattgtagagcttcatcgcttcatcattgctctcaatgaacgttagtagctgtttacgttcatcttcaatcttcgtgaggagcaactttaacgcttcattcaccttgacgttttcttcttcgttttgttcaacgataatcgccagcgccaaccgctctacatccgaaacatcaccattcatcaagccaaggaggcttacactcggcatccaggtctgatccacatcattggctttaccagacatattatggatctgtattaacgcataaacgcttacaacaaccagcagagccacgacgataagaaaacctgtcagtaacttgcctcgaatcgttaacttcaatatccccaacttattcccccgcatgtcttccatctgtcccactcctcaaaataatacatatttataatatatcgtcaccgatcgtcgtgaattgtagatgttagaattcaatttctataaatttcaggtaacttcgaacataacacaaaaaaaagtctcccatctttggcagaaccagagataagagacttctttcaataatctaactacagcaacttccccacacattgctttcaatcgctaacgaaaaacacgtcggtgtatgttaatgaagaagtcgggaatcgacttggtataattgcgggttgtaatcagaaccacactaagcagacttccgagaatgaatcctcccagaatatctcctggataatgcacaccaacatatacacgagacacccctgtcaatacagcgagtaacaacatccataacccgaagcgacgtccaataaagaatgaagcagccgctagagcaaatacaaaggaagcatgtttacttggaaaagaaggatcaggtacatgggcaaccagctgatgcacagtcccttctacaaaaggtcttgggtgaccgaccgctggtgatatcccccatttggccagaactagcgctacaatggaagccacacaggcataaaaaacaattcgttgtttcgatggatcgccgagaaaccatacaataacgagcagtgcgatcatgatccaaaccgcatactcggatgatgtgatcataaaccagtccagaaacggtatttggtctgcaaactgattaatccaattaaatagtgattgattcataactggcttttaatacccccattacacaaaacaagattattttttacataataaatatacactaactatttgtcaaacattcatcacattgaccgaagttacgaaatcaaagaggacattttgctttctttttgttaaactagtttgggttacatatcagttcaatcatagaaaggtgaagattatgcttaaaaaatggttatggggtacagccctgaccctggcacttgcgattacaggtatcgttgtatattacggatattcgattgttcattttgccaatagcatctccacggcttccgggacttcatccaactcgtcctcttccggcacagacagcgattcagacacaccaacgacaacgattcccagatgggagggccaggaacgagtgaacattctgctccttggtggagactcgagaggcgacgatgcaggacgctcagactcggtcatggtcgcttccattgatccggtcaccaagaaagcccatctattctccgtactgcgtgatacctatgtcgccattcccgggcatggcaaaagcagacttaatgcagccttttcctacgggggtgcggagctgaccaaacaaaccgtcagtgatctgctcggtattcccattcagcattatgtctacacagactttacaggtttcatggcacttgttgatgcggtaggtggcattgaaatcgatgtggagaaagacatgtattacaccagtaaagcagataaacatatgtacgacattgacttgaaaaaaggattgcaacatatggacggcaaaaccgccctgcaatatgttcggttccggcatgatgccacatcggatttcacccgtaccgaacggcagcggatcttcatgaccgagctggccaagaaaatgcaaagcactacgtcactcttcaaaatcccagatatcctggaagccatcgctccctatatcgagacagaccttagtccaacccagatgttaaaactcgcatcacttggcttcgatatccatgtgaacgatatcgatcagcagcagattccaccaaacaaactgctcaccaatgaactggtcggctcagctcaggtgctgggtgttgatgtaaccaaactccagtcctacattcagaaactgtttgaagaagatgccgagtcctcagagactccatcagcagagggacagaactaaaacaagcatgagatatatcaacagaaaagaaggccatagccgtctttttttgtacctattttctccatttaatgcagtcttaatgtttaacgggtacccttatatgatgaactccggttcctggagggaggattacaatgtgaaaaaaccgcgaatagcggaatggactgaactgcggggcattgcctttctggcaatcgtcatgcagcatagtatcgctgagtatatctaccgcgctgatattgaacaaccggattccattatgctgaccatgatttatcatctgacccgatttggtacgccaacgtttgtatttctatcgggtgtaatgttgttttaccatcatcgtaacaccaaaccggactatcctcgcttcattcgaaagcgatttggcgatatctatatgccgtttgtcgtatggacactcatctactggctttctgtccgtatcttcacccccgcgttctggcttgcaggcataccggattttcgcagtctgattcgtgaactgtttataccacagacgggatatcatctctggtttgtcattatggtgtttcaattctatgttctgttccccctgttctggacaggagcaaaagccattcagacacgtatccagaacacctcacgtttcacgcccaagcaagtcattatggcactcattgtcttggcagctgcattctacggcctgctcatgaaatggtcctactataatatggggggctggacagaatccatgtctgagccttggtcaacgttactgcaatatcgctcctattcatgggtgatgtactggttctactttttactgggtgccgtatgtgcctggtcagtggatagctggaggagttggaccacgaagatcctgccatggacgatctgtctgtttatagggatgtatatatggcttggttacgatgtgctgcgtgggtccggggatgttgtgaatctgaatatctccacctatctgaaaccaaccacattcctgatcattatggctcagatgtttatgatgtatggtttccttgtactaatgcggggcaaagatacacggtttcagcgcctcttagcctggattggccgctattcatttggtggatatctggttcatgcactggtgatctacgcgatcgcttatgtaaccagaccgcttcatctcagtggatggcatctgcctgtaaccttgctatcgttccttgtaaccgttggtattgctcttgcaatcagttgggcgctgtccaagcttcctggctcacgtttcaccgtagggttaatgcgcaaatcacgtttaactcctaatcgatcagctgctgtggacaaaagaaattcacctgagcgaactccgtcacccggctcaactcgcagtccgggaacgagtgagccgttttagaataaagaagagcgtcccctcacggagacgctcttctttaatttacttcgctcgaagttgatcgtccaggaacaggttcctggggacccggggctggatgcacgttgcccttctgattcacaaatctcttcagatcacccgttaattgttccttcagcttgtccaccagctgcgtttcgctaatgccttttgcctgagcaatctcagccaaggatttccctccctgaagctgctcgtgcagttgagcagaggtcactccaataaaccgggcaatttcgcccttatctaccatggaacgtttgccatggtgggcaaattcacgccgcaagtcacgtagcggggtattaatgacctttttcaacttggtatccatgtctgccttcgtggctgcagcttgttccttggtgagacaaccttcttctacagcttgatccagacgctgtgccagtgtaggcttcaacttctgcaataactgctcctcactaagtcccttacgctctttcgcaatctgggacaacgtcttgccaagttccatctgttctttcagatcccgaagtccaatcccaagcaagtctgccgtctcaccaatcataaacagaccatgtcctgcctgcatgcatggcttcgctggtttgccggaggaagaagcttttgacgcatcgtcatgttgctcagcacgaacggctgggtcagcgaatgctacatgtcctgttgctactgttataactacggctgccaatccggctgccatccatgttttccatttcaaattcatttttctgccgcctttccgatgtcgaaatcctgtgccttcctagtttgagcctaaaatccacttttttatgccataaaatacaaaaagtcatcatttttctcacaattgatcacaaaaaatcctatttttttcagtttatttccgctatactgaatgtaacttcatgatctagtcgaacagtcctgaatcaccttattgcaggaaggacgatatgtaataatgcggaaagattggttagatccgtttagatccgatctggaggtcgtgtttgcttcagcggaacaacgcgtacgggaatatcccgaacccttgtcaggacatgcattagagcagcttcgttcggttaatccgctgttacgagattcgggacacagctacatcgggtacatcattccactttggatgcgacactcagataaactacccccagagaaagcacaccaattaagtacagcctgtctcattcacatgttatattttctgaatcaggacgacgtgatggatgaacaaccggagaatgccacattgaagttatccctgggtaatctatattacatggatgcacttcaatcttacgcggtattatttaatccttcctccacgttctgggtctatttcagacaatatgtagtggattgggccgtgagtgttacgggtgagcattccattgattatttccaacagaatcccttgttgattgcgcaaaaggctgcccctctcctcattggagctactggtgcactccttcttcagaatcagtccgaccggataatcccggtgtgttctgccatcaacatcacactcatgactctccagatgaccgatgacttcacagacacgcaacaagatgctgtgcatggaaactacaacagctacctctcccacatatccgcagcactgaatcacaactatccagttcatcctctaagcgaacgtatacatgacaatgtatacaatacacaacttatgaactcttatgtagacattgcttatcactataatcgtatactaacatcgtctaacttaggaatatcgcatctcgaggcgtttaattcttatttatgcagcactttagtacaagctgttcaggacattacacaacggaagaaacggctcctccaaggcgggtttcatcactggattagcgagcaacagttgggattctgaacataaggactaagctgattcagtttaattttaaatatgaagggaatgttgacgatgatggtatcagagaaaacgttgcatgaggatattattgaaaaggcttggactgacgagcacttcagacaacaattgcactccaatccgaagcaagcgcttcgtgaagcgtttggcatcataatcccggagcacattcaggtgcgtaccgttgaggagcagcagaatgactatgtgcttgtcatacctcccaatccttccaaagtaaattatgatgtgaattgcggaccttggagaagttaaaccgggtgagttattggtaatgtaagaaatcaggggtaggaacaaaaaagccgctgtatccttctgtgagttcgtcaatcgacgaactcggcaaaagatacaaccgcttctgttcctacccctttggtgcttgtaaagctgatctgtccttgcatcgcttcaacaattcggaatgtcaccatcatgcccaggcctgtgcctttgattttattggagaaataaggctcgcccaaccgggagagtgcttcctcgtccattccttctccgttatccctgacatgcaccttaatcattccatcctgcttgtacgcccagatatcaatctgaccttgtccctgcagagcttcaatactgttcttgataatattgataaaagcctgcttgaacttcgaggaattgcctcgaatatatagatctggcggaatgtcggtagtgattttaccaccttccagattagccatcggtacaagaatgccttcaatatgattgaactcatccgagatattgagcgagataatatggtcaaactcaggtttggcaaaggtaagaaaatccgttatgatgcccgaagcccgatcaagttcttccagtgcaattcgcacataccccttatttttgttgtcttcctgttccgtcataagttgcaggaaccctcttgtcacctgaagtggattacgtacttcatgggcaacggaagcggccagttcgctaataatctccatcttttcggatcgctgcaactcattgttgaacagctccagttccttggaatactctagaactttagtatgtttttcggcaaaacgacttccgagaatggcaatcaacgagatcacaaatgcaaccatggaccatttccaccataacagatgatacgtcccactccgctgataataccacaacagttcagccacactgatcaaggcaaatgtaccgaatcccgttgcaagcagcatagcttcccgatttcgttgcagcgctttggcgatggtaccaactaacaggattgtcagcagaatgaccagcacaatgccaaccacacgctgtacgagcagattgtagaggatctcccattgcccacctgaagtaacatagataaatagagagaatacagcgataactgaatatatgaatagtatttttcgaagtttggtgaagattccatgcagtcctggcccgataatctgttcaaaaaaataacatagcgctggcatacccagcagcatcgccagatcaaagactacggaatacaggtcaccatatacctgatagaacgtatacaaaaattgcgagtacgtgatgatcatcgtgccgatggaacccatcacgatgcatagcgagatccataatcccttatggaatttgccaaggaagaatgtacaactcagcatcgtaatcgctgtgaacacaaaggtcgcgcccaaaattacatcaataagtccgttatgaatatatttctcctgtaacgcggcataaggtccaacctgaacaataccttgtatccccagacggcctttttcattttgcgaccatacatagagcgtgtcacctgaattttcgctggataagggcagcaacacagcattattatcataattgtaatgatagttctcgtagaccttgcggtcttccagataaacaacaatatgattgcctttaatgttctcaaatcgaatggctgaactttcctcactcaactcaggaatggtcaggcgagtccacaaagaattcgatcgatccgtattgctatactctaacttatcactgccctgcttttcccatatctcgtctgctcccttaacctcactgatgaacccttgatcgtcaacgttcccccattttacttcccatcctgtaatggatacaggttgctgaaccgctcctgtagttgcaaagactaccccatgtggcatgcctagaataatcaatacactcatccataagatgacgatagctttgggcacatttttcattcacagcacctcaaagttctaattttccctatcttagattctctcatttatcattcgccaccgtttgtcacgtcaccttcttgagataaaatgaaatttcacatttaagtcgatttatagtcttatttccattttattgttaaagttatccgattaatcacgcaagtcttcgaactggttcacgatcatttcctgttctttctgttcaacttgactgcgaaattcaagccactgctctgtctcctcatcatcatagatggtccaaatgtcggaaaaaaggaaatcccgtaattgtacaacttgcccggaccatataccgcctacccaaaacaaaccatccggacgacggatgacggtacgggagaacccgggtgtggacgccttttgcccgatacggatgcgtgtgatcatattgcccagtgtgaaccagtccacatgaaattcctcccttacatattcaagcttcatcataacataggcaaaacaggaaaagctgtaaaaacggtggctgcgattcaatcctttgctccgggtgtaatggtttctcaaagcaaacaaacacgctaaggagatgattacaatgaatgagccacatcgcacggttgaggtcgaacataaggatgttcagcataaatcggattcaagtatggtcgcttccacatttattaaatatgccgcatatatcattatctttttcggattcttatacttcttggtgaagtatgtattccccaaattctaaggcattcatatcgtagtgaacacccggagataataacctgtgcaagattacaacactagcgctttgggtaactacggggtaagaagctttggacaaccgacaatgaaaggaagtgttactcatgtctgacaaaccaattagtaacgaagagagcgaccgctattatgaccgttatcagaggtcccgcgatattccaccagagacggaagtccccgaaggcgacatggatacctttgatgaagtttccggcagacggattgtaacggaagattcggatctggcacccttagccgcaaccgctgtggacgagccggaattggattcacgtttggctgagacaccgctggaatctgtacctgatgcagatcttctgcaaccgaacagtccggttgatcctgctgcacccgatccggatgcgctgcatggtaccgatctgcttaatggtgctggtgcagatgccaaaccagagaacgacattccaccacgacattaacagttgttatgacatcctgaatgaggaggtgcatacacgatgaaggaagatcgccaaaagcatgtgcatgaaccggataatctcgtgaccgaacgggatattgacccggatttcggactgttcactgaggactccttccccgaagcacttgagaatgaggatcaacgtgatgcggtcgagcatgccattcccaaagagaaggcttctcgtaagccctcttcggatgactaacttatatagatccatagtagacttaaaaaagatgacgtctgtaatttcacagcgtcatctttttgttacctgtaagttcacttacactcagtgatttagcatcatcgcttagcggaaaccttacttgccacgggcagtttgtgatccaatcctgaccacttcgctacaatcgcagtgatgatcaatgccactccattaataataaatatccagcgtatcggcagccagcccccaagtacaccaccaataatcggtcccgccatcgtcccgatctgggcagcggattgattcagactaaaagccctgccccggaaacttgatgcggtagcctgcacaatcatggcgttaattgccggaaatacagcggcaaagaataaaccatacacaaatcgtaaaatgccgaatgcgatataacctgttgtaaagaactgcagaagattccctacagccccaccaaccagtccaatgatcaacactttaccgtatccaatccttgaaccaatcttgccccaacgcggcgccataataactgttgctactcccaccgctgagaaaataatacccgagctgagtgaggcacgatccggctgaacgcccatctccatcacatagaccgtcaatagtggctccagaatcatgacggagaatgtacatatacccatcatgccaagcaccgtcataaacaaacgattcgctcttgcttcacgaatgtcatccatgacgtgggaacgcgctttgttccggttgaagttctcttcttttacccaaaaggttgcgatgatcgcggagactaacacaacaatagccgaaaacaaaaatgcattccggttgccataataatgactcactacgccaccaattaacggtccgataataccaccagtggctcctgcagtggacataataccaagtgcataaccagtcttctcttcaggtgtattcgtgcctaccagggctatcgctgctggaacaaaccctgcaagcaggccctgaaacaatcgaacaacaatcagcgaatacgggtcctgcacgaaataattaattaaatacaagacggcaaggctgtatcccgaccggatcagcatgggcttgcgtccgtatttgtcagccagtgatccccagaacggagacacgagtgcactcgcaagaaacgtaatgccaaatgccagtcctgaccataactccaggtgatcacgaacccccaagtcagcacttagaaacagaggcagaaatggaatcgagatcgaataggcggtgctacaaaaaaatacaccaatccacaatatgaccagattgcgcttccacgagaagttcatatacccgcacgccctttccgttactgacgccgggactgccgtgtattggagcggacggaacagacccgtacgtccccgatgcggaagcattttccttattttacacccatcattccatgaaggccatcccttgttcaccacaaacacatgtattacattgccatcctgtccacaaaaacggtatgatagttgggtaaatatccaaataggatttggagaaaatatataatgcagagatgcaaggaggaacgttttcatgtctttacggtggaaaaaaaacacagtggtttcgctggttctcgcgatgctgcttatcgtcattagtggttgtggacgccctgcaaccagtgccgagcaagcgccggtcccggccgcacctgaaggtccaaacccggtggctaccattgagatgcaggatggtcaaaagatcgttattgagctctatcccgagattgcgccaaacacggtgtataatttcatctcccttgcgaataaagggttctatgacggcctgatctttcaccgggtcattccgggctttatggttcaaagtggtgacccaaatggtaacggttcgggcggcccgggatacacgattaagggcgaatttacatccaacggtcacaaaaaccacctgaatcatactcgcggagttatttccatggcacgaaaagatggagatctggattccgcaggctcccaattcttcatcatgttagctgacgcggatcatttggataatgcctatgctacttttggaaaagtgaccgaaggtatggaagttgtggataacattgcagctcaggaaataggtgaaggtgacaaacccgttacggatcaagttatgaaaaaagttacggtagatacccacggtctggagtatccagaaccgataaaaatgccttaattaacttcctttccaaacggataataatccatggttatgacttgaaaggaactctaaacaaacaaaagctctgtcctgtgcgtatctcgcaaggcagagctttatttattgattttaatgatagcggttacatatatgactttataaaaaatgacctcttccggcatcatcctcaatacatccatcccatcaaacgtaaccagccgataatcgcaatccataacgggcagctaaaggcaatgccccatgcaagccctttcagtaaaccacggtttacttccacgaacaacgactcctttctccagggaatagtcgcagtatcggtaatagtatatgattttatacccgttttcattcgtcacgcaaccctcgttttcctgcttttgttccgcagattcatggaatgctttacgggaacctgatatactatgactactgtacgataaatggaacctgattcatgtttggaaaggagattttcctatggcaaaatccaaaaaacgcactcctgctcccaaagcagcaatagcacaggataaacccacaacactgaaggatctgcttagcagtgatgtgctggagaagctgaaagctcaggcggatgaagccaaggctgccgaagcggctcttaaagagcaggaacgtcagcaagcagaagaagctcgccaagcggagcagaagcgccgggataacgatttcgagtatttgctcaataacagtgcaatggactggaagaaacataagtaaaccagggcatgacctgagggtgtttcctaccattcacatgccaaaataatattacagcagacagatcatgaagatgatctgctcacagaacagggccgcattgcggtcctgttctttttgatatatacacatatgattcacgcatcttgagccgggtatgttagaagtagagcgtacaacgataatctaactcatggagggatcagagatgacagaacaacgtttggaaggcaaaatcgcgattgtaaccggaggtggatccggtattggtcaagctaccgctattcgtttcgccgagcatggagccaaagtgtacatgctggatcgaacacccgaaaatgcggaggaaacaaaacagacgattgaaaaggctggcggagaagcgtatgtgatcgaatgtgatatctccaaaccggataatgtgcagaaggcaatcaatcaggctgcggctgaagcgggtaaactggatatcatatttgcgaatgccggcattaacggaacgatggccccgattgaaacgatggaaattgaggactgggaccaaacgatggagattaatatgcgcggaaccttcgcaaccgtcaaatatgctattccccatctgaaagaacatggcggcagcatcattatcaccagttccatcaacggtaaccgggtcttctcagggatcggtttctctgcatacgcttccagcaaagcgggacaaactgcgtttaccaagatggctgcactggagctggctcgttataagatccgtgttaacgccgtctgcccaggagccatcgataccaacattgatgataacacctacccgtcggatgatctgaaagaagtacagattcctgttgaattccctgagggtcacgaacatccgctcaagggcgaacctggaacgtcgaagcaagtggcgaacctcgttctgttcctcgcttccgatgaagcctctcatgttacaggtacacgaatctatgtggatggtgcggaatctctgctccgtggttaaaaatatcaaagctggccccattcagggacaacgcccaaacatcccgcaagcgacctgatccagtcaggttactgcgggatattttatttataaagagtttataatacggcgcagacgcaattacaaggattatccctataccgcggagcttttaccttttttcacacgatgcttcaaccgatctggaatggcaaagagcaaaatgtacatcagcgagaacaaaactagcgcaagtatctcttccccaaggatgtacatgggatacggacctaacatatccagcaccgagggtgtactcggcttgtgtctcaaaaacatataattcgcgtcaagcatgacatctacaacgtatacgattaatgctgccacattcacaaatatcatcgaacctgctacagatctccagctaggtcgcagctgttccacccaggtcatgtagagtaaagccagaatgatacaggcatgagcaacgaaaaattgaatgaatcgaaaatgtgcataaccataacccagattaggagtcaggatcgccataagggctccggcaatgcctgcaaacagcagtgcagaatgtaacagtcgactgcgtgtcagtagtaacaacgccgataatagcagagacagactgcatagttccagtggcagtgacgtctgcaggctccatatccctccatacacataccagagctgcagcacgatttcggaggcaaacatgatacaagccagaacaatccgcagtatgcggcgtgccctctctgaccatgatcgaagatggtgtcgaagcaaaaacatcagtacaatcaatgctgtaattacgctaattgaaacgatatgtgaagtggagaacaggataaacggctctgcatcataagggtccagccatggtggaaacgccatgcatctcttctctcctttacaaggatttcaccaacagtatctctctttaatgttaactttttcattttgccattgaatgaaagtgctgtccagttggaattctaaataagcattgtaatttaaatatctttatgttaagataaatccagaaacaaaacaaacgaaaagttagtaactttcttaatcgaaatgaaatataccgtacttaacaaacgttcaactgaacatttacactatcccatttcatctaggaggaattattatgcaaatcaaaggacttcaccacgtatcagctctaacagcacatgccgatcagaactatcgtttctacaccaacatcatgggtctgcgcctcattaaaaaaacggtcaaccaggacgacgtgtccgtctaccatctcttctatggcgatgagaaaggcaatccgggtaccgaacttaccttcttcgagattccgatggccggacagacacgtgaaggggtgaacagcatatccggaacctcactgcgcgttccaagtgacgcggcacttacttactggcagcaacgttttgacgaattcgaagtcccacatggagagattgttgaacgaggtggtcgtgccacactctcgttcacagactttgaaggacaacgtctgattctggtctcggatgaaaataatacaggtgtcgctggtggtaaaccctgggatcagagccctgtgcctgccgagtatggcgttgtaggccttggccctatccatcttacggtaaaagatgcttcccttacctctccggttcttaccgaactgctcggtttcagagctaaaggaagttaccctgcctttactccaggtcaacctgatgtactcgtttttgaatccggtgaaggtggcagcggctccgaggtccatgttgaggaacggaatgaccttgcccaagagcgtcctggacgtggcagcgtacaccatgttgcgttccgtgtggataacgaagaagaactgaaacaatgggtggaacgggttcgtaacttccaattccctaactccggttttgtagatcgcttctacttccgctccctgtacttccgtgaagcaaacggtattctgttcgaacttgcaaccgatggtccgggatttgatacagacgaagaattggagcatctgggagaatcgcttgctttgcctccattccttgaaggtcgccgcgccgagattgaagccaatctcaaaccgctggataccgtcattcgttaatattcgtaacaaaaagaaaataaaaacgatgttcaccaggcaactctgaataccggatacggttcaggaatcgcctagtgaatcatcgtttttttatgtttatgcttgccttgccccttctgtaaggtcgcaaacttgcagattgtgttttacttcgtcagatacgatgttgtgagcggtacaaacagagccgaacccggatcttcagatacaatctctacatagacagcgtctgtacctttaacatccacatctagactcatcataccgctttctggagtgatattgaactttttgagtgtcgcgagatcctgatcatagatatgaatctcctgatttcctttcagtgcggcaagttccaagtgcagagaagaatactttttacccgtattaatctggatatcatccccctgtttcgtaggatcattatgcagataaacatccttgtaatccttgcctttatatgtggtatccttaggatctttggtgtgccaagcagtagatcccagtacggatgttccaagtgcactcagcgttacttttccgttggttacgggcgcagatccattctttccgccaatcaggacggatgaagttgcactgtcataagtgatctctgtcccaagcaaagatcccacagcacgcacaggcaaataagtcgttccgttgtaagtgataggcaacactgttttaccattggcatctttggctgtcaccgtggcaccatccatttttagcgtaatcttgctgtttagataggctttaatctgctccaaccctgttgctgcgagtgcacctgttccgatcccaagcgttagtgtgcctaccatcaaacccagtacaacttttttcttcatcaaaatccctcctgaatgttaaaatgatttgtcctttatacatttaaacgactaaagtgataatgtcaattgtttactgcatttttagtacacattgcctatttccgggcagcacaaaacgaggctgtatgtccccatttttttcagcctcgccctgtttcccattgtccgtatacggagaaaggaagatattcttgtcagttgttcacttaactccacaatcgagaacttttaattcccactgcactatgatatcaacaggatgatatcaatcaaaagattcataatattcttcttcatacacttccatgctgtacttcaaatctacggccttccactcgccatcttgatactcataagcaaatgtcagatcacccgcatacaaagccgcaccgtaagatcctgctgctgatacgacaagctggccatcctctacactgtaataggtaactccaccgaaccccaactcttcgttatatacgccgccactcgtatcttcctcgatccgtaaaggttctgcttgaacgccatcaacggcgacatcaacatccacacggtctgatctaaccgtaacttttgacttcacatgttgtttcgcaatctcatccagagattgcatcttcatctcttccagcgttaccggattaatgatacgtgcttgtcccaaataaatacctgttccatgaccttccgtgtacaaaacgataatttctttctggccgtctccattcagatccaactcgtgcacttcgggtttgtaagacccgccttctccctgccaatcactaaattctcgcgttttgccgtccacttccaaaatcattccgttatatatatatatcctgaaccctcaactttcatagggtataatctgacgttctcattctctggagctaccgaaacgtattcctctttcacaggaatggattcctgtgttgtcttcgttgtgtcatgcagtttatctatattggaagcctcgaccacttcggtctggctggattgatcatctatgttaagctgtttttgcgattcattcatggttctggcagccgaagttgtactaatcgtagctaccgccaaaataatcatcagcaggatacctgtccaagttttcaatatactgggctcctttatctgttgtgataatcctattatatcttcatttatcgcctgcaagttgcgaatttgttaatctttcataaaataatctttacaaattttcgttttcacgaaagaacgttcggctttaaccagaataagcaaattatcatgccaaaactgttctccaaaaacaaaaaaaatcccgaacacagcttaaggctgcatccggaatgctttggttttgtccaataaccgatcggttaattgtctcagttcttcagccgaggatgaaatctcctccatgatggctgtctcttcgtgtgcggcatccataattcgtctcgcctcatctgagaacgatccggctttgccctggattttcttcacatgaccgtgcgtttgctccacgcgaccggtctgttctgcaatcttggagccgatatcatgcgcacccttcataaatacttccactgtgcctgtcagttcatgcaacgtctgatccacagagacggtccgctccgattcattaaccacgagaccatgctgctcatgagacagttgggctgtctccctgatccgctcttgcacacgactaatcagctcattaatacggtgtaccgattccttactttcgtctgccagcttgcggatctgctgcgccacaactgcaaaaccagaaccctcttcgccagctcgtgcagcctcaatggaagcattcagggcaagtaaccctgtttcctctgcgatgtttttgacagactgggtaattacctcgatatcggaggcttccttctccagcaacaacataatatcgcgggaacgattgtgcgactcggccagctcgtccatccctttcatcaacgatgagaaagtctgtttggtatgatccaccgatcgttccatctgaccggacatctctgtcatatccatggactggctatgcatacgctggaaatcgttcagcatctcatctgcagtgatcagagattgatgggaagtgaccttctgctcttctacgcctaccgcaatatgatccactgcatccgacatcatctcgatctgttcggcggcctgggtaatcgcttcactcagagactgtgcgttctgtgaagtcgttcttgtactgtcagcaatatcatttacaatgcttcgaaggttagaaaccattgcgcgaaaagcatcatataatacagtaagttcatcctgcgtgcgtcgctgcggaatttcggttgtcagatcccccgctgacacttgctgtgcagcccgggacaggtgaacgattggacgagtcagccagcgtgaggcaaaccatcccagaatcccgttccagcatacacccatgatcaggataattgatatgtatacccaattcggaatatctaatgtaatccagtctttgacaaaaaatataaaaaagccgctagttccgtaggtaataatcgaaatcagtaccagacctgcgacagtctttgctcctaaagtccatttcatgtgcacaccccgtagtccttttttcctattttaccaatcaagtaccaaatttcatgtgatatacatcactgaaaacgttctattccccctcatacttgccgttcatgcatgacttctctaccatatagcgcataatgtataagacaagcttggatatccctaattttatttattatcggcacaagaggccaaatgatttagattggcatccattttgcttaaatgatatactgagtgcgcttcagcaacgctggagccgaactatttttattgatgccactggaggcgaacgagatgtctactatgtccacacggacggagaaagattttatcggtgaaaaagaaatcccggcttatgcttattacggaattcagacggtacgggccgtggaaaacttcccgattaccggcgttccggtacaccgggagctgatcacggctctggctgcggtgaagaaggcagcagccattaccaacatggagttgaagatgctgccgagcaagattggcgatgtgatcgtcatggcagctgaagaaatgatgaaaggccatcatctggatcattttattgtagactccattcagggcggtgcaggcacctccatgaatatgaatatgaatgaaattttggccaaccgcgggctggaactgttaaccaaaagcaagggagactacttccattgcaatcccaataatcatgtgaacatgtcccaatctactaatgacgtggttcctacagcactgcgcattgcggcgtaccgactgtcggagacgttactcgctacgatgaaaagactacaggatgcgttccgtaaaaaagaagtggaatttaacgatgtggtcaaggttggtcgtacccatcttcaggatgccgtacctattcgccttggacaagaattcggagcttatgcccgtgtaatcggacgggatattgagcgtcttgaattcgccaatcgccgcttgcttaccattaacatgggtgcaactgcggtaggtacaggactcaatgccaaacccgaatatatcgtcaaggttacagagcacctgtcagctgttaccggactaccactacaaacagctgaggatctcgtggatgcaacgcagaacacagatgcctatctggaactatcagcggcgctgaaggtatgtgcggttagcctttccaaaatctgtaatgatattcgcatgatggcttcaggtccgcgtgcaggattcaatgaactgcgcctgccaccacgtcagccaggttcgtccattatgccgggcaaagtcaacccggttatggcggaagtcattaaccaggtatccttccaggtgatggggaacgaccatacgatctgtatggcgtgtgaagccggtcaattcgagctgaatgtcatgggcccagttattgcgttcaacttgctgcaatcgctgaaaattatgaataacggcatcgatgtgttcacacgttatgcagttgaagagatggaagctaaccgtgaacgctgcgaattaatcatgaagcaaagtttcagtgtggttacggcgttgaacccgcacttaggttataatgtggcagcttccatcgtgaaggaagcgctcaagactggactttccttgcaagagattattctcgaacgtggattgctgacaccggaagaactggaagagattcttcatccggaacagatgactacaccagggattgccggagaacacttcctgcgtaatatggaacgtttgtaggtaatcaggaaaactgatgcagcaacccaaacacaaataattaacaagaaccctcgcaaaccgttcatccggtttacgagggttcttgtattcagagaagataagacgccagctattcgattaagcccaccgtttacgctcaagggaaggcagaatctgaagttcctccctgtacttggcaaccgttctgcgggagatgacaatcccctcctcggcgagcaatgtggacaaatgactatccgagtatggacgctgagtctgttccatgcgaatgatttcttttaatctacgtttcaccgctgatgctgatgttttatcccctgacgttgtactgattcccgagtcaaaaaaagccctgagttcatatacaccatgtggggtctcaatgtatttaccgttcaccgcacgacttaccgttgattcatgcatgccaatcttctctgcaataacagccagattaagtggttttagcccggatgggcctttgaccaaaaagtgcttctgctcttccatcactgccgccagcacacgcactaaagttctgcgccgcaagtgtacactccgaatgatagccctcgcttctgccacccgggtagaccagattgcgtccggagcctcttccctgatccagcggaagcacgcttcattcatcgatacccgagggttacctgctgcatgcaaactataatggacctcaccgttacgcaacccaacaatggcatccggaataatgtaatgtggccgttccgtacatccgatcgatcgacagggcttggggtacagacgtgtaatatagtcataggcagtctgagcttcccgtgaagtcatacctaatcgactccctgttctacctgggtgaaaaggaaccagtgcttccaatcccgcttccaccatccactccgcattcagcgctgctgatggatcacgtctaatctggagcaatagacattcttgcagattccgcgcccctacaccagcagggtccagcgattggagaagatccagtcccactgcaatcttgctcatcggaagctcaagtgttgcttgcacctctgccagttcaaccgtcagataaccatcatcattaacgcaccctgccaaatatacggccatattttccaattcgtctggaattgtcatcactcgaatttgcgcaatcagcaattgttccagagtaggttcggcacctttggcctgaagcagcggatcataggaaccatacctgcgctgatccattcgccgcggaatccgggcaaggggcgcagcttgttcttccagttcaagcaccggattttcctccgccgcatcctgcaaataacgggtcagatcctgaccagacatggttagcaattgaaaggattgtttcatctccggcgtgatggacagccgaatacgttgttcctgtaccaactgaacacctaacatccgttaccctccttatgccttcggcaataagcatctgtgtttcttatacgaacaaaaggatttgcagggataatagcatactattcaagtgaatgtaagaagtttttagttggatcatgggtttctgtctagtatttctcggataccagcttcgcctgggtaaacaacagcagatagtctcttccacctgccttggaatccgtgcctgacatgttaaatccgccaaatggatgtgtgcctaccagtgctccggtacatttccggttgaaatacagattacccgcaaagtactcacgtcttgcctgctccagatgttcacgattacgtgagatcaccgcgccggtcagaccatagtctgtattattggcgatatccaatgcatcctggaatgattctgctttgatgaacgcaagcacaggaccaaaaatctcatcctgagcaatccgggctttgggatccacatcggcaattatggttggttcaatgaaataaccttcaacgttcccggtaccgccaccgtgcacaagacgtccctcacccttgccaatttcaatatattccgtgatctttgcatatgccttgtcatcgataacgggtccaacctgactgccaacttcaagtggactgcccatcgtcagtttctgtgtccgttcaatcactttttgcaatacttcatcatatacatccttatgaataatggcacgggaacacgccgaacatttctgtcctgagaaaccaaatgccgaagcggtaatggactctgccgcgagttccagatcactgtcactgtctacaacgatagaatccttgccgcccatttctgcaataacccgtttaatccacttctgacctggagcagtacgtgctgcacgttcattaattcgcagtcctacatctcgggaaccggtgaaactgataaaccgggtgagcgcatgatccacgagataatcacccacttcactgcctggtcctggtaaaaagttcacgacgccatccggcagaccaacttctgcgagcagctccataaacttggcggcaatcaccggcgttgtgctggcgggctttaataccaccgtgttgccggagaccagtgcagcagaggtcatgcctgccataatcgccagcgggaagttccaaggtggaataacaacaccaacacccagcggtatataactcagttcattatcttcccctgcaatccgcacgaggggctgcggttcactcagtcgctgcatatcacgtgcatagaattccataaaatcaatggcttccgctgtatctgcatcggcttcaggccaagtcttgccggcttcataaaccatccatgcggagaactcatgcttgcgacggcgcataatggcagctgctttgtatagataacgggcccgttcattcgggtcagtatgtttccatgtgtggaatgtctccgccgctgtctgaatggccttttcggccaattcctgatctgcctgatggatcgttccgacaacttgattcttggctgcggggttcacggaagttaacgtgcggctgcttgttattttttgcccaccaataataatcgggtattcctgcccaagttcagcttctacctgacgaagtgcgtcttcaaatgcttcctggttcgcctggactgcaaagggtgtgaatggttcgttaacaaaagggatattcatcaatgattcctccttcaggatgtgggattcgctggctgctcgcctaaattattttgcatgttactcatcaccaaatatatgtagcaaaatccgtgccaactccggttgagactgaaatatttttctcgttaaatttaactaaagaaaattcacacgggccactccgatgacagaataaccttccgatcgctgttatccccagatttttttgattcctttttataaagttaaaatttccatgaaaaatagtagaccatcgccaaatctggcacgtttcttgcttgaattaaggatgcacaatgctgaaggaggaaacgaaaatgagtgtgggaacggaaatatatcgcaaaaccttattaaccgtggcaggcaacaaagctgtagagaacctgtccattagatatggtaagaagctggcaggcaaatttattgcaggaaacaccttggaagaagctctcgaagagatccgcatactcaataacaaaggcattatggctacgctcgatcatctgggtgaaggcatcacccgcctgagcgaagcggcattgtacagggatgagtatgtacgcctggtagaaggcattgcacgtgaaggcgtagactccaacgtctcgcttaaaccaacccagatgggcctcgcacttgacccggaagagggttaccaaaatatccgtaccgttgccgcacaagccaaattacatgatctatttgttcgaattgatatggaggatagtccatttactcaagcgacgctggatattgtccgaagactgcactcggaaggactgcataatacaggcacagtattgcaagcctacctgcatcgcaccgaagaagatacacgtgatatgattcgggaaggtattcggcttcggctggttaaaggtgcttacaaagaacccggatcagtcgcctatcagaatacttctgaagtcattcatcacttcaaaacgatgattcgtaatcacctcgatcagggtgtgtacactgcggttgcctcgcatgatgatcacatcattaactggacgaaacaatacgccaaggatcggggaatctcgccggatgcctttgaattccagatgttatatggtctgcggatgagcgaacaggaacgtctcgccaaagaagattatcgcattcgctgttacgtaccttatggcaccatgtggtatccgtactatacccgccgtttggccgaaaaaccggctaatctctggatggtcgttaagaatatgttccgatagttattttccagttggattaatatttatgaaaaaagacaaaagaaaaccatgtcgcctctttttttctgggcacatggttttttgtgtacgaacactttacgagagcatccaacttgacgaatggtctaaacaaaagttgacaactatatagttaggcaccatactatatgtatggacaatcaaaacaaatcaacaactgatatgtacctcatcccttcgttagtacaaacgaagcgtcaggttgatcgctatcaattagacgtggatgcacaagccgtgcttgtcgcatccagactgatggtagcaggagccaaacttgggcatgctgcagaaatccatttctccagatttggtttatcgacaggacgatatcgtctgttggcagatcttgaagatcacgaaggagaagaactgccctcccaactggcggaaaatctgggtgtaacccgtgctaccgtaactggtctaatcgagattttagaacgcgacggactggttgctcgtcggacgagttccgttgatggtcgtcagaagtcagtcattttgaccgccaaaggtgcgaagaaactaacggatatggctgcggaacatttttccagactggaagcgatggttggattacttacgatcgaggaaaggagtgtgtttctcaacctgctggggcgtgtaacacaaggtattgctgcacttacagatgagtcacacgacttctccgaaccaaaatcctaggagcataatgaagaaaggtgaaccgggctagttcaactagcccattttcatcaccatatagttaggctcctaattacttatagatgaaagcaaatcagtgatttctaaacaaaaaaggagtagtgatatggttaaccttaatgaccccattcattccgaggaagcttatccaaaccgagctgctaatcctcccccaaaaccttttgtgctgtggcgtgaattaatcccggcctacttgtctcctgccatcatggcaagcatcgggggaatcgttaccgctgatgaagtccttcagttacgagctttaacaacgattggaggggcgtctctgcttatggctctatgggccggactctggcttcgtaaccgtaagaaccgcacacggtgggtggcaaaagccccccgaatcattgtcgtgggctgcttggcacttgcaggcgcagggtttggcttggtggcggcgtgggggatttctaatgtattgcagatcgtaaacccgagttcttcatgggcttggttggatcatattgggttcgattttccattgtccggtgcaatagcttgtacgatcatgacatggcgctggcgagcttacattatcaaataaacaagttcattattaaggagagattgaaacatgattactattattggagcaacaggcatgattggaaatgtacttttgagacgtttgatggaaagaggtattcccgttcgggcagtaagtagaaagccggataagcttcgtcaacaaatggcggacttggcgttgtccgggattgaaatctgtgctgccgatgcaaatgattccgaatccatgcgcagagctttggcgggtaccagtcaactatttctagcgttatccaacaaccctaaacaagtggaactagagacatccattattcagatggctgcgcaagagggagtcaagcatgtcgtcaaaatatccagcccagcatatgacgaacgttcaccagtaactgtagcaggctggcatgaacaaatcgagcaagctctagtgaaatccgggatgacatatacaatgctgcggccctatgcttttatgcaaaatctgctccgactcgcaccaaccattacaactcaagatgtattcttcggctgcattggagattccccgtgcaacttcatcgattgccgagacatcgcagatattgccacagaagtgctgactagagacaaaccagtgaaccgcatctatacgcttaccggttccgaagcattcacttatgcacagattgcagataaaatgtccaccctgttcaatcgtccgatcggattcttcaacctcaaacccgaggagcttcgaacggatctgatcgaacatggacagatgcctccttggcttgcagaccacgttgtggaaattcagacgatgtcttccgttgtgccagagaagccgacggatacggtccaacgcttgcttggcagagcgccgcgttcacttgatgcattcctgagagaacatcgagatgcatttaaaccaaggctgtaaaccaagttatacaataacgaaaaggggctctctcgctccaagcgctaacgaccccaccgcatattagagcgataaacaaaaatgctaagtttaacgaacttcagcgttctagaggatggttatgagctctacaggaatcctagcggtaataatgtttttaatgagagaacttaactattaattaagctaaagtctagccactcaaaaagagcggctagactttatattatgactcttttaatgcgaaaattattaaagtgagaacttcccatgatttgcgcccgaagactgtcaaccactaattatgagataggaccacaattttaaatgtctatttttctggacacacccatttattatttaaaagttaaccacttaactgttgaataagaatagaagcattagcattggtctgtgttccacctgctagtgtttgcagaccaacagctgatgcgctggaatgattccgtaatgtcagcacatcaccgggagcagccgtaataatgaccatgcctggattcggttgagtcccagctcctgaaccatagacactgccacctacaggggctccgttttgataaagggtgaattggtttgcctgcacacctgcaacgttgaaaaacaccgcatagtccccggcattaccaataataatcgcagcggtattgggtgtatgcgtaatattcgtaagattttggttgctgtcgaagattacatccgcttcaatagctacagtttgagctgaagtattaaaaatataggcataagaggacaacccttgccctgctgtaccggttgctccagtgacacctgttgttccgataaccccagtgtttcctgttactcccgtaatacccgtggctcctgttactccggtagccccggtacttcccgttgctcctgtcactccagtagctccagtgcttcccgttactccagaaatgcccgtggctcctgtcactccggtagccccgatacttcccgttgctcctgtaacaccagtcgctcctgtcactccagtagctccagtagctccagtgcttcccgttactcccgtaatacccgtggctcctgttattccggtggcccctgtaacgcccgttgctcctgtcactccagtagccccggtgcttcccgttgctcccgtaacaccagtggctcctgtcactccggtagccccggtacttcccgctgctcctgtaacaccagtcgctcctgtcactccagtagctccagtgcttcccgttactcccgtaacacccgtggctcctgttattccggtggcccctgtgcctcctgttactcccgtaacgcccgtggttcctgtcactccggtggccccggtgcttcccgttgctcccgtaacgcccgtggttcctgtcactccggtggccccagtgcctcccgttactcccgtagctcctgtcactccagtagctccggtgcctcctgttactcccgtaatacccgtggctccagtggctccagttacacccgttgtgctcagcgtttctcccaataactcctgggataccaatcggtgagccgcgactaattcgcctgcggcatttttaccccatacggatatttgtgcttctggagcagccgtgtctgaggttgaaaatacaaactcaaaagcatcaaaattcccattataaactttggttatgacctgattaggtgatacattgagcagttcttctacatataatgttctgactccattaaggtaatagccccgaagaagcactgtgaacacatctgtcgcattccggttatcgattttgaccgtaacggattgagttggtcggatccccgttattcctgaaatattattctcaatgggcccagttgatagaatcgccatatcatcaccctccttcgattgaattcattcatttcagtccttggtatagtattattcagacgatacttaatggtgtggacaaattgagagtcaacatatagaatcacttaacctgcccagtgaatgtgttgagattaacgaactgatactgtcatgttcatgaatgcttcactttcgcttcagattgagagcgtattctagttgtacaaaacaaaattaaccactatttccgattgtcttatgtatgattcatgtcaaaaaatctatacacacttcactttgaaagctataatatggataactatctcactcaaatatttccatttactccgatcataaaagttccttgtaacaggtacagttctgaaagttatgccctaactgaggtgatatcgatgaaacatttacttccagaattaatgtctttattgcgtacggatatggatgttctggatacagacctccccacacttaccattccgtcatcaacatcgttggtagatgccttctgcttattcgacacatcttcttatttattcattcaggatgatggccctctattgggatatatcgccgtatccgatgttttgcatgccatgatgcatgcgcatcgcctaatagaagcttattttgagaccacactggagacagcgggttcagctctgacattaattaatgaagatgccaaggtggcctactggacaactggcgcggagcatgttttttcgatcagcaaaaaagacatcatcggacaacccgcagcggactttttccctccagatcggttacagtctctcaagacgttgtataccggcgaaacggtctatcgcaaacagcatcagccacggcccgacctcttcgccctgattaatgctcgtcctgtccaactggatggacatattgtgggtgcagttgctgccgaagtggatataacaaccgaaatccgattacatcaggaactattacatatgacatccaaagttcaacatctggaaaaagccgttgctcggctacgtcccgaattagatccatttgccagaatcaagggcagcagcttggtcatcaagcagtgcatggataccattcgcaagatcagcaccacctcagcaaccgtacttatcctcggagagagtggcacaggcaaggagttattcgccaaagccattcatgatcttcgtgaattgcagacggcaccgttcatagcgattaactgcggggcaattcccgcttccttgttcgaaagtgaattattcggctacgaaaaaggcgccttctccggagcggatcccaaaggcaaaaagggcaagattgaacttgccgaagggggtactctttttctggatgagatcggtgagatgccattggaattgcaagtgaaactgcttcgggtgttgcaggagaagagttactttcctgtggggggaacgcgaatgaaacaggccgactgccggattatcgctgcgaccaaccagaatctacggagtatgattgcacgcaatcaattccgagaagatctctactatcggctgaatgtcattaaccttgtcatccctcctctgcgtgtgcgcaaggaagatctctatgagttaacccaaacgttccttcaagaattctcattgctctataaccgtcatatagagttggttccacctgaagtattcaaattgctgttccaatatgattggccaggcaatgtacgtgaattacgaaatgtgatcgaacgcctgaccattctgacgacagatggtgaggtgaagcaggaatatctgcccgataccctcacttccctcaccatacaagaacagtccgaaatccaactgacatccggaattcattcacatgccaacaacgaatatcagcaacgtcaggattcggcaggagcagaaccagaaccagaacctcgatccgttgcacatgtgaacgaattagatcactccgatgattccgaacttatctccggtgttacctaccagcaaaaattggacacctatgaggcgcaacttctaattcaatatctgaaagcagcaggtggcaacaaacgaacactcgccaagcaacttggcatctccagggcaacgctctataaccgcatgaagaggcttggtctatgaccagcctcttcttatcgtcattatcggtatgatgaaccctacaaaattcgcgccaagcgagtcagcgctgttctgagatggcgatagaatgtcgcccgactcatggaacacgtctgggctgcggcagttggattgccagcatgcgtccagtaggccgcgtataacagcatctgatcttgtggagataggccatgtactctgccttccaacagatccatgacatacagctgtaactggattccatcctttactcctctaaccctgccagcatattcatgtaattctcccggggaacgaagatcccccaacatcttgcgaacatcctgttcagtccagattacaccatccacttccgttgtttccggctgtatacgatcctctgttgattccggatcaagcagagacatgacccactctccgaattgcccgctacgcaaatccaaatcaagtatgtccgcctggtcctcgaatctgtcacagacacgggtgcgggttcttcgcatctggaatccaatgctctgcaaaaatagtttcaggtgaggattcgttgcaacgagtatcgctcgtgcaccatcacccagtagagatagtcgatccagtgccatgtatcccaccagttcttctcgtgtataaccaggcacatcatctcttgccgcagccagcaaggcaaagtgcgtatcactctgatccgggtcgttttcaagttcctgtggtgtgaaacattcatacatctcatttggaaaatattttagtaacaactcactactctccctatgtacaagaatggtaatgaacatggcgattgtctccccaagcttgtcacgcattaatacgattccttcgggataacggtgcgccagttcatccaggaagggaccataggataccgcctgccatggttccacgctgtactcgcaccattgctgtaacaggctgtgcagaacgggcagatcctcgcttctcatcgtttcgagaggtgagaacaaggaatcacgggacacatccgcgtacttgcggtattgaagcatggattcctgacacagcaacagcatcttccgggcgatctggcgacgctcatgtggacccgcctgctcatgcagtggtttcagcagcttcacgatcttgatacgcatggtctgcaaccgctgaggctcacgctggcgaaaatctcgtagtagatgtactctggccatatcatgcagggcaagaccatccgggccggaacggataaacgacatctgtctcagcatgtggtactcttcttttgtcacggtcatatccagtactgatgataatagttcctgattggctgtctcaagcagtgttagtacctccactacaggatgcagacggggtgtcgtaagttccaataataatcgagcactgatcatatgggacagttcagcccattcggactgtgggagattcctcctctgatctgcagcttctacagcaagcgccagccccagcggatgtccatcggtcattcgcgtaatggtacctgccatcccctgattcagaaagcctgccaccgtgatgtattccgtaatctcatcaactgtgaaatgttgaagccgcatctgtataaatctctgatgtaatcggggatgtgtccgccaggtggacgccagttccgggcgtgatgcaagaatgacaagtatccctcttaacggaagtttggatacaaagacttccatgaaccagctttctaacagagcaagctcttcataattatccacggccaggaccattctcttctcgatcgatgtgtctctcagcagactcaatggtcgcgggtatccttcactatccattgtttccaagcctaatgtagaggacaaataatccataaaaacggaaggagtcgccccacatgatcgaccatccatccagattgccctcgctcctcgatcccgagagacagataacatctctgaaagtaaggaagatttaccaattcctcccatgcccgtaattgaaaatatggttaatggggcttccggatgattgaaccaccactccagtgtcgtcagttccttggttcgaccaatgaaccgtttaccatcctcaacatatttgtcgtattgagcctcactactgtttcccatatatgtcctccgtactagatactggtacttttaatatacttttttctctcacaaaattgagactatattgagacgcgcaattgggtgtgaagtgatagaatcttgttaaaagccaatttatagtaaatattcaaaacagcggacatggaaacgtttttacaaggtatacatagacccctccgcgctacttcttaacataatggatcattccgccaatcaagcacagccaacatgtacatgagcatttaccgatctcgaattcatgcttccctttcataccctactaccagcccgatattccaggaaaggcggatttgtgtgagaataaacctcgatatctgtaatctgagcggacaacttggaatcaatcctaaacgacttaatgaatggctgcaccaaagtggcatttcaatggaggacaatgaagcagaacaggaaggacgtcccgaccggtcgtcacccccgtatcggctggctgctccttcttcattatcactggcaccttactccggtcaaacgaagctttatcggggccgacgctccacttccactctgcaacgcctgcctgcttcattacgacacacccggcggattagtaaaaactgctagactgtgctcaaggtagtgtaagatcgatgcacagtctgtgttgcatccctttcacctcatcaagaggattgccactgtccattctcaatcatcgcgtgcgcgagcagcgccatctccagacagattcttctcccttgatccatgtaacctggacccatcagttcttccagcttctccagtctgttgtacaacgtttgccgatgaataaataactgggcggccgcatcccgtttggaaccaaagttctgcaggtaagcatccaacgtctctaccaatcgcaggtgatgcgtttggtcatgttcaatcaacatacccaggtgatcctggacaaagggttgcaggaaggattggggtaatgcttttaacatttgatatatacccatacgttcgtaaaagtgaacatgttccatcgaatctaccgatctcgaaacttcgatcacctgataggcctcctgaaggctctccggtagaccggtcaaacggctgcgaaacttgccaaatcccacatgaatcatgacctgcttcaagttgcggctcgcaaactgcttcacgtccagagcgattccttccagcaagcgtagcagctgatgacgtgtagtagccgagactgcttccttcgcacagcacagatacacctgattgttcttcagcatgatcaggctaggcagattgttcttcttgagcagggaacgaagcaggacaagaatatcctgatgattcgcttccatcctctcccggcccgtacccttcaatcgatgctcaatctcgataacccctcctgcaaaccagtactgtcccttcaccagcaaacgaagccccattcgagtctgagcctgttcctcctgatggatgttgccattcatcagatcctggatcagttcattctgattgcggaccatcttctcttcaagaaactgggaacgaagcgtgagcgttgccgccgccttcgccgtataatcgagcaacagcttgagatattccactggagctgcgggatgcacaatcatgcctacagccgaaaatacctggccaaaacagacgaccggatgacacagcagagccttctcttcgtctatgtggaaccataattcagtatccgaatcattcagatccagatgttctacctcctgttcataccaggtatagattgcttgctccatctccggagcaagttcgggcacaaagctacccggctccatagacgagatgtacaccaccggttttgcagcgtattcatgcaacaggttcagcacagcagacatgtccgtactctgtaatgtacgctgctgaagctggcgggagtaggcttccagacttttcaacagttggtgctgatgattaatgagcagagagtgaatatcctgtgtaatctcgacaaaacggaccggttgctcaaatacgatcagcggaaactggtgtctgtccgccagttcaatcagttcttccgggattccgtatatgctggtaccaaactccacacacagcccggctgcctcactgccaatgagctgaagcagatactcttcgcgcccttcttccgattgaagccacagtccagtggataaaataagatcatgggggcttacgaatggagatacattggtaatctccaatacatgaacccagccaacctgacggttcactccatccttccctgccgctagtcgtgctcggccaaataccggacgtgcaaggatatctttgatcgtaaacacacggtcatttcgcaatggcgatccctcttcgtgttattttttcttacattataatccatggacaaatgtcctgaacagtctttttcgacaatatgttgagttcaatttctaaagattagacatcaagtaaggtgcaaaacgattatccaagtcataaacttgtagtataagctaacaaccaataaatggacgaggtgcatggtgatgagaatcggaattcccaaagaaatcaagaataatgagaatcgtgtagcaatgactccggccggggctgctgatttcatcagagccggtcaccaggtactgattgaacaaggcgcggggatcggcagtggattcacggatcatgaatatcaagctgcgggcgccgagattcggatggatgccaagtcagtgtggacggaagccgatatgatcatcaaggtgaaagaacctcttgccagtgaatatggatattttcgtccgggactgattctgttcacctacctgcacctcgcagcggaaccggagcttgccaaagcccttattaaaagtcgggtaacggctattgcgtatgaaacgttggaggtcaacagtgctctccccctgttaacccctatgagtgaagttgcaggccgcatggcctcccagatcggagcacaactactggagaaaacggaaggtggcaagggcattctgttgtccggtgtacccggcgtcagtcgggggaaagtggtcattattggtggcggaacggtgggaacaaatgcagccaaaattgctattggtcttggcgccgatgtgaccatccttgacctgaatctgaatcgtctgcgccagttggatgatatctttggcaatcagatccacacgctagtatccagcccgtccaacattgcaacagctgttgcggcggcagatctgttgatctgtgcggtgctgattccgggcgccaaggcgccaacacttgtcagcgagcaagtggttaagacgatggcaccgggctcggtcattgtggatgtggcgattgatcagggcgggatcgttgagaccattgatcatatcacaacccacgatgaaccgacctatgtgaaacatggcgtcgtgcactacgcggtggcgaacatgccgggcgccgtgccgcgtacttccacggtggcgctgaccaacgccaccatgccttatgcgctgcagctggccaaccacggtgcagccgccgcgattcgcggcagttcgtccattcgcagcgcggtcaacgtgctgaatggacacatcacgtatgaggcggttgcccgggatctcgggcatgcctatgttcctgcgggtcaggcgctggagaataccgccgctgtccagtaatcttgatatgatcgttccacccggcgccttgtcgccaggcctgtgggacgcaaatagaagcgcaagtcgggcagatgatgttcccggcttgagcttcttgttttttttcacatatgaaatagctcactggttggtataaggccttttggctcctccggttttggggcttcagactgctcgctcactgcatacttcgcggaagttgcaatcccggcaggaccggtgcgatggcatcgctgtgaagtaggtgacgtccttgggacggttataatactcatcctccacgcaggatcgcatctcctcaatgtaacgacccacgttctcctccaccttccggatatcctcttctgtggctgtaaactctcggtgttttccggttaacaagtactccacacgaagctcaatctgctccaaaggaattcggtagtgctcccttacataggacgcgtacagcattagctgatccgagaagtcatcttctttgcccgtcttccagtccacaataacaatattgccgttactgcgtcgatacaataaatccatcttcacatacacacgtgtatcgtgcagcatcatggtatcccatttctcgatctccagaatgtccgtacttgctcgggacaagtcctcccacgtaagcgtctggtacaggttaccgacacaggccgaagcccgttccttaatcgtggcgatccggtcattcaacgtgtcatccccgtaatagatctcggacagcatcgtgcgattcttggggttcagccgccactgatccgcgtccatggattccacatacgcctgattcagcagcttgcgtatcgtctgttccaggaagtgttcacgcggtttatctttgccctcttccctgctgcgtaccgccgactcacacatccgatgcgcgagatccccaaagacaagatacagattgctgagctgcttcagacggtacagacgaacctgcatctcatcagcagagtctgtcttccaaccgttatgggcaccgtaataatgataataatatttgcgcaggcactcatcgaacatactcgcccgcgactgcgaataagaccactgcgggtattgtgccataagtaatctgcctttctgtatgccggatctgcatgagatcccttaatgctcacagtataaagcccgggcaaccttgccgcaagcgtgcttccgttattttcttctgacgcaaccgtttccgattcgatccgtatcgtttatatagtaacatcaccaaaagatgaaattgcggagcagaacgcataatatactctatagagggcagcgaatctggaaccgggaggctagttcggatctagcgtgggtccagtgcgggcccggcgctaacgaatcacacacaccttatcacgtggatcacgaggttttacggaatctaacgaaccccagacaagctaattagtcttatttcggttgtagaacgtgtttactgcgagcaaatgagccaatagcgtgtctctgattcgttacattttcagatctgccgatttacgtgaaataagacttactcggtttgttagaaaatgattatatgaaaaaaaattgtacaggcatatcctaaaaggaggcaccacccatgaatcgaccggattggttccaggcggaagaagcattacaacagatccaagtcatcggaagcgaccggaatgagctcgtgaacatcatcggcgatgtagaaggattaaattgcattggcacaggtacggatgcggctgtatttacgtatgacggcttgccgcagtatgccttcaagatgtactcggatcatgccttggacaaactcgaaaatgaaaaacaggtatacgagcagctcaaaggcctgccatacttccctacctattacggcagcggccggaatgtactcgtgatcagttttgaacccggggatacactccttgaatgtttggaaaaaggaatccccgtccccgagcaggtgatgctcgatgtggaagcagcgcgagaagccgttcgcagccgcgggctgaaccctcgcgacattcatctgaaaaatgtaattcttcaggatggacgcgggaaagtgattgacgtatccgagtatatccaggacggcaatgacaatcgctgggagcatcttgtctgggcttatcacaacatctatccacggatcaaaggaacgcccatatctccacgcatgctgcaaacgatcaaatggggatacaatcagttcgatcatgccaacgtcaaaatggacgacctcgccaagaaagccaatcgtctgttctccagatttatgaaatgagtatccaaattcacttcactttaacctaaattcagatgttgcagcttatccggattacgcaagatatagatccgctcaacacaatcgtttctaaaagctaggctgaccacagtcgggaatgcctcagaggggctgcttaatacaaatcctagttgtccattgactttgacgagacgtacaataccagcgctgtcccctttggataagagcccttgaatgaacgctagcacccgctggcttgatgtaacgggtttaattgctgccacaactttaccaccaccatcactgtacaaggcgacatcgtgggaaagcatttttaatagtcctcccatgtctccactcgatgtggcttggaggaaacgaagcgcaagctgctcggactgaacgctgggagtcaactcgacttccggctcgtcctggattttacgtttaagacgactgtatattttccggcagccgacctccgtcttgttcaagaagtctgctatatcgccataatcaaattcaaaagcttctcgcagaataaataccgcgcgctcaattggggttagccgatcaagcatgaccaggaaggcgtacgaaatcgtatcttccagttcaatcgtttgaagtggatcatgttccacggctgatactgattctcgagcagccttataattttgcaccagaggttccggcagccatgtcccgacgtatagttccctttttttacgtgttgatttcaagtaatcgagacaacggttagttaccattttgcataagtatgctttcaggttccgaacagagctaccctctttatgaataccctgctgctgtactgttacaaatgcgtcctgaaccacatcctcagcatgaatgacagatcccagcatacgatatgcgatagaaagaagaaggggtctatatgtcctgtataccaattcaatctccataatgtattccttccttatcttttcctctaccttctattatcatttgagcagcccgttttgcgctcgccagagaggcattaatcagcatcccttcatcccctacccaatcgccagcaacatagagccccggtcttcctgtgatctcagatccaggtctacccgagagacctccgttctcagctgtgacactgccatgtgagacaagcattcgtggaagaaaccgctgcttaatgatatgctcgcgccaccccggctgaatcaaatcgagaaagccctttagttcgtcttcatcctgccttggatccgattttgatgattccgacaaatacttcatcacatgcacaacttcatatacagggttctctgataaggaggccgcggcggaatggttggagtagtaccaaggatgatttacgcctaaaacaaattttgttttcggttgaggcatcccggacacgacgagatccagacatgcggctcgaacaggagttaacttgtgatacagtttggcttcaatgggtgaaagagcaggattaagcagagctaaagtatccaatgggccagccgttgataagacgtggcgagtcgtcaactgtgaaccatcttttaaggaaaccatcatctgaggataacttccggcaatttctcgtacgaccgagcttgtgcggatggatacacccgcctgctgagcttgttctgtgagccgaccaacgaggaattgccaacctccatctatatacaatacctggtcctgtttgagttgttcaatgacggcgccagcacttacctgatcaggagcatcgcaataggtgctcaaacgaacgagcgcaaatacgacactacgtacacgtagactggataccaggggttccaggtaatcacgcaaactaacgttatgcaaaacggatgtatctacctttcggagagaactgtagaaccgaagaagctggcacttctctctccatttcaaaaacgatccgagcaagagctgtgctagggaaattgtcttattcccgccgtttgttccttcaaacaccaatgtatctggcggtttcggtactgatccgataggtgtgacgcctacctcatggagaatgggcaacgctgctttactgagagcatgagcccccaagttcacgcgtgctcccgcaatctcatttgagatagcgcgtcctccgagctttacccctttgtcgagcaacagtacagtctttcctgcacgggccagataaatcgaggcggttaaaccggcaatgcctgctccaatgatgataacatcccatactggctcattatgatgctctgtcatgtacatcaatcccctccgcttaatgcatacatgacgatgagcagcggacttttgtgactcagacttgcttcttcattcgccccccagaaggagttactcccttgtactgtttgtataacttcgtaaaatagttcgcattgtcgcagccaactctggcggcgatctccgtaatggtcagactactgccttgcaatagttgctctgcctcactcatcctgcaaccgttcacgtattccacaaaggtacgtccggtcagctttttgaacattttgcagaagtgatacgcatttaatcccacatgacttgccgcttccgtaacagacatcttacctgtggggtccgcttcaatctgtgcaatcaactgtttgaaacgttcgcggtttggaaaatacgatccgaccgatctatccggtagctgctgcggcataaaggttcgcgcaagcagggtgaacaaagcatgcagtttggacttcaccacaagctgataagccgggggctgtaacgccatttcctccacagcttcattcagcaaagaataatagcctgtgcaggttgtgttttcctctgccggtttgaccggaaatctcactcttccttccagatacggcgcgacatattgctcatgcacaggatcatgagtgaaatcatggaacagtgcacggttgaccacaacggaatcataatgcacatccccctcatccagagcatatccgacatgcaatgtacctccaggaatgatgatgacctcacctgctcgaaccacataaggtttgctatcaatatgaaacagcgcactgcccttacgcataataatcagttcaaaatgttcatgccaatgcaaatacagaatgcattcttcaactttcatatctgaacaccgattttggaacagctgaaatggatgtgatttatggtcaattcgggtattttcgtgaagcgctttcagatccagcacgacttcttccccctcttcacaagatccgactattattacacaagattgtttagagccatcccgttaatccacggctataatgagtgtgtcacgaagtactataagccaatattggagtgaaatacaaccatgaataaatcattacgcatcggtacccttgtaggcgggcaggacgccgtccgcgttatcccgcagatcatgcaacacggctttgaatcatttaacctgaccttctggcaaacgactggcgacctggacttggctgagacagccaaacgtgtccgtgaaatcgtggacgaacaaggtattgtcatctccgcggtgagtgtatttggtaatccgctaactggagccggagacaacgccgatacactggcaagctgggagcgggtgatcgatcacgcacagctcttcggtgcagatatcgtctccgggtttaccggacgtctaaccgatcaacccattaacgagtccatcccccggttcaaggaagtatttggtgaactggcacgtagggcagcagaccggggtgtacgcattgcttttgaaaactgtgatatgggcggcacctggcagacaggcgactggaacattgcccataacccgacggcctgggagatgatgtttgatgctgttccagatgaaaatgttgggctggagtgggagccttgccatcaaatgtccagcctgatcgatcctattccacagctacgcaaatgggctcacaaagtcttccacgtacatggcaaagatgccacgattgcctgggatattgtcaaggaatacggtgtgcatggcccacgtgaatttgtctggcaccgcacacccggcttcggggataacaactgggcagacattatcaccattctgcgccagaacggttatcagggcacgattgatattgaaggctggcatgatcccgtctacaaagacgaactcgaaatgaccggacaggtgcatgcattgcgatatttgaaacaatgccgcggcggcgattttgtgcccaatccggtataggaaaccatgcgagctgtataacacaatccatgcgaaggagatgagaacatgactcatccttatcgggtaattatcgccggctgcggtgccatggcaaacacgtgggcggattatgccttgcaaaggccggatacagaaatcgtcgggctggtcgatctgtatgaacagacagcccttacttttgcttcaagacatggcctcacctgccccacgttcaccgatatccgcgaagccattcaaacgactggtgcaaatatcgtatttgatgtcacgattccggcgagtcattacggcattgccatgacagccttgaaggaaggatgtcacgtgtttggcgagaaaccactggcagagtccttctccgactgcacagatattgtgcaaaccgctcgcagcacaggacacattcaagccgtcatgcagaatcgccgttttgatccgcgtatccgcgcctaccagcacctcatttccggcggagctatagggcaggtaggttacgcaggagccgactttttcctcgggccacacttcggtggattccgtgatctgatggatagtccgctactgctcgatatggcgatacatacgtttgatcaggcacggtatattctcggagccaacccagtatcggtgtactgccatgagttcaaccctccaggttcctggtatcagggcaatgcgatggcgttatgtatatttgagatgtctgacgggtccgtattcaactatcgcggatcttggtgcgcagaaggtgtacccacatcatgggaagcaagctggcgcgtaatcggtgaaaaaggaaccgccatctgggatggtcatgatgacatctatgctgaagtagttactgcccaaagcctggatgctgacggcaaaccatccttttttcagccaagtgagcggattgaagcggaactgcctgtcatggacaaaacaggtcatcacggctgtctcgaagacatgttcgccgcactggaatccggacgattacctgagaccgattgcagcgataaccagttcagcatggctatggtgctcgcatccttggaaagcgcccgcacaggccagaaagtgttcatcgccgatctactgaaaaacacatagcaaaacgcctatgtatctcatcacaaacaaagcccaactgcaaagtttagcagtttgggctttgttgtttttttacctactcacctattctaaaaatgatatcgttcaaaaacagtcgcgctcgatagtaaaagtagtgcagggaacgaaatcgattctgaagaagcaaagcgttcgcccaaaagctttctttcagaaagctgcatcggaagcatacgcttatcaccggatttcgactttacaaaagtcgatcaggaaatccggggataacagcgatcaaaagaacgattcgtaaccggaacggctgcttcacgagcagtgagcaatttttttggaactttcatcattttatagaattccttttttcattgccttatacaccaactgcgagaacaggctgttggaccaggcaaaccatggtctggtgaacgtgtttggatcatcggcgtggaaaccctcatgcatatatccagtacctgcatctgtgttctccagtagttcaatcatcgccagtatttcctcgtcattgtctgcagtcagaccctgcatggatagcgccatgtgccagatatatcccggaggggtatgagggctaccaatacctttggctacccgcccttcataataaaacggattttccttacttaaaatgaatcgccgtgtgttctgatacaccctgtcttcaatcgaagcataatccatatacggtatagacatcagtccaggtgtgcccgcatcatccatcagacaaaagttgccgtaaccgtccgtctcataggcataaatctgcccatactctggatgacggtaagttccataaagggcaataccgtgtcgtatttcttcttccaaacgagccatccggcttaccagttgttcatcccggaacacccacttcgcgatttcccccatctggcgcaaggttaccgcagcgaacatgttcgccggaatattataatgaaaatcacaagcatcatcactcggacgaaatccggaccagatcatgcccgtataattcaccggcatacccaatccttcattacgcagcgtatcatgggctggacaattacgacgcatgaaccggtaaggtgattgctctgtgtgatgctgttctgtctcccatagttgtacgatattctccatcactttcttgaagcgctcatcgaatatatccgtaagttccgtctcccgccaatatgtataagccagcttcatggagaaacaaagggaatccagctcaaactttcgctcccacacccaagccgacatctccgtctcatcattggcatcccaatgccatccattcgctgtttcattgaacgcattggcatagatatcctgatcagcgtagaacgtatgccgtttgatcaggcctccgataatacgctgcaacttctcatcatccttcgcaagtggaacataatgcataacctgctctaccgaatcccttaaccacatggcgggaatatcccctgtaatcacaaaggttgtcccatcctccagtagcttcgtggtcgtttccagcgtattgggaaaacaattgcgaaactgagtcagcaatctcggtcgatgttgcaagcgctcgtccgcctcagtcagaatatcctgcacagcttgcggcaattccagatgcggcatagggattttcggtaatctgaactgttccatggatgttgtctcctttgaattggtttatttaagttcagctaatatttttttacaccagcactccgattgcagaataaccttccgatcgctgttatccccagattttttcgatcccctttcacaaggggaaatccggtgataaaggcgcacgcttcgcttcttcaggttattcctgccctctccgttatcgtgtaaatatttagttgaacatatatagattggagctaacacttctaattatgttgttatttttgttatgataaattataataacattattatttgtaagtgtactgtgtcagaagatgatcgtcaattcataaaggtcatctcattcaaaattcaattcactatttacatctgcaatttgcattcattcaatcaattcgctcattggattcatgcaaaccgctcacatacgaaggagtaatgatatgtcacgcaaagtatccattcagacgctggctgaccagctcggattatccaaatatgccgtctcccgcgcactcagtggcaagacgggtgtcagtgaagcaacacgcgcacgggttctggaactcgctcgggctttaggatatcgacaaagtactccgggtgctaacaatagtcctgctactgcaaaccatgtagatccgtccgatccaccgtttgctctcatatgcatgaatcagctcaaccgcggtgaacctcactactggcaacgtgttctgtcaggcatgatctccgcctgtaatgagcgtggctggcatcatgccatagtatctccctcactcggagtgacggacgagaacacctctcccgaaaaagctattgctcctcacttggactgggaacgttgtgccgggattattgtcatgggtgcttttcctcatacggttctgcaacgactctctcagacgggtcggcctatgattttggtagatcatcaggagcccctgctgaattgtgatacaatcagccatgataatctggaagctggcatcacagtggcgagatatttaatgtctatgaattgcaagcgaatcggccttatcacagacgatggtcgtgctgccagcttcgcgcagcggaagatcgggattgagttggctttgaatcatttccatgtggacaccagtcatacgaccagcctcagagaatggaatattccgtatgagaacggcgaatgggttaaccaattggctaccaccattcaaaacatgccagaggacgagcgccctgatgcctggattggtgttaatgatgatatcgccttgcagtggatgcacaaattaaaggagatgggcatctccacgcctaaagattgtcttgtcatcggtatcgacaatgtgcactctgccgttacgtcttccccgcctctgaccacggttaacctgtgcaaagaggaacttggacaacgtgccgttgaagctttacaacgccggatcgaacgcccggggacgccgaaagaaacggttatgttatcgaccacgttgattccaagggaatcggcataattcggaaagggtactgctctcttctgaagatgaattctttaggtacttgccttcgcgtaaatctggtacatacaaaagaggcctcgcataccattatgctgggcctctttcgtatattaagcttataccttatattcctgtacattcacacttaaatctactgatccatccttatacatccattcaaaacttcatttacttcatgtctgagaattgtactactggttatttcagccaaggcaggctatcgtacgacggaagatccacttcccaatttacatcacggaactctcggttaactgcggttcgcttcaaagtgaatttcgttccattttcttttttaaaaccatggataatcaacctgagatcacctacgatgtattcttcgtttttataaggccgatccgtagttcccatcacttcaacgggatactcctttccttccccatctatagccacccattgatctccattaatatcattttgaaaagtccctactccctccaaaacaagagaagagttcccttcaaagtttctttcaggtagctttaatgattgctgcactggccaataattgtatttggaaaataaaacttcatctccaaattgttcaaactgtagtacgtaggtgtagaattcagcatccttacgcatcttttccaaatccacttccacggacttctcctcccacaccgggatggtgtagccatcgaggacaaagcgaattttcttcgcatccaccgtaacataagcagggtcccatgtctcagacaacttcaactgaccaccgttctggttcagttcgctcaaatctcgaagacggaacttggcttcacgtgtatccggtctgttcccattgaatattcgatactcatttttttcagggatttcgatatgatacataatgtccatatcatttgcccaatcctcatcaactttggcacgaagttcattatccagacttacattcaggtcaagccgggttccgtttggcgtacgtacaagctgggtcatatcgaacttgagcccttctggcgtcgtatatgtgttatccatagaattttcaacagccaatgatttggctttggtcatatcgatcttgaattggaagctccaatccaccgtaacttctctatcttcgtaggatttcttctcgtaatcataatagctgcccacatttagattacgcagttcaccccgcacgaccacctgatccggaatttcatcatgcaactggaataccaatcgttcagatatggagccctttgttcttgtatcccttgcaagagtagcaacctgtcgccccttttcatccgtaacatgaattctccccatctcagacagtaaccgtgatccccctaatccatcaggtgttgtttgttgcatagtcattacaatctgagaacgatctaccagcacatcttcaattttaagcgtgtagccctggtcattgatattgatatccggattaaccacaagtccaagaggtttaagacgtttataatcatccgcaaaataggaatatttcaatgcttcaggcacaggtatgttaggcaatggcagacgatccacagcatttaccgcgggttgtgctggctctgctgttcgttcaaaagcaaaccaggcccctcccgcaagaatcacaactgccgctgcagcgattccagtccgacgcatccaatgcgctctcatggattttttcacgaatggatactgatcttctccactttccatggacacgccatccagcttctgcatgaccttaagcgtaaaatccgcgtccggctcctcatgatacaggtgctcctcccacaaccgatcttcatcccttgaaataggcttcatacgtagctaaacctcctttgcgttccatttgcttcctcagcgtttttttcccgcgataaagggcgttgcgcactttggttgaactcatgcctgtaatgtctgcaatctcttcatagctcaactcgtttgtgtactttagtaataacaccaggcgatacgattcaggtaattgttcgagctggcggtatatttcacgctgcatctctttatgcagcacacgcttttcaggtgtttcattactgacaggttcgatcccctgatcgactggagacatgacgggtttcttttcccgtataaaatccctcatccgattcaccgcaatggtatacacccaagaggagaagcagcttccctcccgcctcgacgggagataacgatagatgcgaatgaacgtatcctgagcgagatcctgtgcatccggatgactcgcgcccattccgcgcatgatgccgtagactttatttttatatcgatccacaagcacggagaacaactgcttatcccctgcaacaatgcgctgaataagctcctcctccggtatctgttgagtcatgtaatcccccttctctacagcttccatgcatggttctgtactatatagacggaagccgttcccgaaacctctcactttatccaaaaaaaagaattcgcccttatcggcaaagccgactgggtgaactctgcttacttgcctcttaatcttccctgttcttctccgcaacaaaatcagcaagctgggaatagatcgccacaatctcatccatcgacatgcgcacgagtccactggacgacggagcgacgaactcctgaatttccttgacgaccgggtcgtcctgaaatccccattgcactttggtacgcttgctgtactgggtgtatacaccttttccgacaaaacaagcgatgtccggtcggtatttctccaacttttgccgtaaaatctgtcgtccttctgcgtactcttccttcgtaatatcctccatacctctggtgggccgggccacaatattcgtgaatccatatcccagcttcagcaactctccatcctcctgtgcatcatataaacgcggggttaatcccgaccgttcaaggatgcgccagaaccggtttcctttgtaagcataatgatgacccgtctctccagacgtaatgctcggattgaaaccaataaacaatatcgataaaccaacatccagatgatctggaatcatgatgggaagcccccttattttttttaactaattacatctttcgtgtgtgtataaaatgatataataagcaaagtattttcgaaatcggattgaaattttcatgaaaaaggaagctgaactaatgattgcagacatcatgcttgaagtcgtcctgcccgtctttctcctgatcgccgtcgggtcctggatgcaaaaggtgttcaagctggacttgtacaccctcgccaaaatcaatttctattatattacccccgcagccgtctttatgagcatgtaccactcggatatgtcgggcgaactgcttgggaccgtgacactcttttacgcgatatatgtattgattctctatattgtaggttctgtatgtgcgcgctcgcttcggatgaataaaggcatgaaggctgccttcaacaacagtattatgctggataacgcaggcaactatggactgcccatcaatgcactggtattccgcggcgatccactcgcctcttccattcaggcactggtcatgtctttacaggcactactgacattcacctatggcgtgttgtccattcagggcgcgaagctcaaaggtaattaccgtgccgtgattattggttttcttaaaatgcctgttccatatgcgctcttgctggggattctgttacacatgtggaaggttcccttgcctacgttcctgtccatgccactgacctatgcgcagcaaagtatggttgccgtggcgctgctgacactcggagcacagattgtaaaatatccaattcaactgtaccgtcttgatgtgtatattagcacatttttgcgccttctgattggcccggctatcgggatttcgatcgtgcttatgcttgggttggaaggtatctctgcacaggcactcattattgcctcgggtatgccgaccggtgtcaatgcatccattctcgcagaagaatacgataacgaacccgattttgcagcccagacagtactaatctcaacgttgcttaacatcatcacaattacggcactgatctcttatgccaaaacgttctgaaattttagaatggaataaatatccttagcattcatagaacggtctatcttcacattttggagatgggccttttttcatccattacattaagcaaatgccataacacccttttcagaatagataaatagtcccttcatttcctgaaataagtatacgctcaaaatttattatgctaagatttaggagtttccaaaatttgaatctacctttagaaaggaagtcagcatgaaaaagctagttataatcatgttcctcttgtcatctctcatcgcaggctctacagctgccagtgccaaaagttccaccttcaatgatgtctcccaatacaaacactcttgggctatcgaatccattgaatttatgagcaagaaaggaattatcaaaggttaccaaaatggcaacttcaaacccgataatagtgtgaccaaagcagaattcatcacgatgttttcacagttatttaataaatacataacgaatgatgacactccaactcgtaagtttaaagatgttcctgccagtcactgggcttacagttccacatccaaagcactctcacagtttacctattcaacatatgccattaagaagggaaacaactatttctatcctgacaacaagctcactcgtatcggagtagcaaacctgctacctgtcttatacgatgagattgatgatgatcaagaagtctatgacattctccacacgatgaaagatatccccaaacgcgagtttaaagatgaacttttggatgatggacgctttaattatgaaattgatgggaccaataagatctacccgttactttttgaaggactggaacttagtgatgatcactcggctttggttggaagccgtctctcagccttgcagaagaaaggtataatgacagcgaatgaaggcctatttaatcccaaaaaaacaataacaagagcagaagcagcaactattcttcacaggttatatctcgatctaaaagcagatggtacgcttaaagaatattcaagcaaataaaacgtaaaaacactctgtatccagtctacaacatgggctacagagtgttttattttaacgagtgtatactatgattcaaacgtcgttcgttccgggaacttgccgccttccctgaataaacatcgtaccagtcgctgcgcggctcggttaaagaaaaaactcgggcttaccccatccacctggacaggttccagttccctcacactttccttgatcttattcatctcaatgagccccatctttcgctcattcggtccgaatcgataaataaccttctcatcgtcctccgtctgtttcaccagcagaatcacagatgccatacaggttaccccctatcgttgcgttatgagattccattaatcacttgcctactataattattacccagattctagtggaaggatataggacttaagttagttatacctaaattaaatattctgatataaagattctctggaatgagtcgttaggctcacaagcaccgtgtttacactatcctaatggatagtcactgtcatgaaagtgcgtactgcccaagtcgtttttctccgtttatactaaccatatcttgaattttcaaaggagagaaacttatgactacagctcaaatatatagccacggggtcccgtgggaagaggcattcagcgttgctcagggatacagcattaacggtacgatctacattgcaggtcaattttcgcatgatatgcaggggacgtttattggtgtcgatgatattgaagcacaggtccgccagacattggataacttggatcgcgtgctcgcaggatttaacgtgaccaagtcgaacattgctgaactggagatttttttggttcacccgcaggagcatcttgagccatgtgttgctgtgtataaagagtacattggtactcatcgtccggctgttacgatggttgggacatcgggtctggccttccctcatcaactgattgagattcgcgccgttgctcataccgactgatccgggtcatgtcaaaagttgcagcgccaagtaaaatggcctgatgaggtttcgctttaacgaagttcatatacaaaaaaaagcaggtcggataaactccgaacctgcttctttatgaattcttaatcttattctttcaccttcaccgtcagcgtattaccagatgaagtgagggatgccccaagcccttctaccaaaactctgaggggaatgtacgtcgttcccttaatttctttgggtgctgcctgtagggtgacttctttcccgttaaccttcacctttttactgcccaaggtaaagattagcttgtacttgtctttggtaacggtaatggtctgagtcttactgtcccaagacgttttggctttcattgctttggccatctcacgcagaggtacgagatttgtgttattcattataattggagactcggtgaaaataaccttggaaccattcaccttcacctgaatagcagacttgatatattctggtttaggagtggctttcttttgggttgccgttgaagacttattacttttcttggtacttcctgaactggatgaacttgaagaggaagatttggaactcgaagaagaacctccgttgtgataatgatattccccttgtttcagcccccattttgcacagttggttcgacaggtatgtcccccatttgcatctgttcttcccggatgggcagatgcaacagtagcaaaaatcataaaaatggcaagcaaactgcttattaatttgatacgcatacggataacctccagcaattagtttggccagagtatcataccatatttacccatacaatataggtgaataacaaaatttattttcatataacagtttacagacgcgggtatactcacttcaactccatcgatagcgttatcagcacacaactttcttcctcttacccccgttcgccccacacctcttgtaatgccaaacggaaaatctggtccaattcttcaaattgaataatccgctcattatccatcttgccggccattcgttcaaaatgctcgatcttctccgccaaaaaagcttgtattgctggcaactgcggctccagatccagttcctcgcccgtctttttccggcgtagtaactcatgaatctccgtatatagcggtgtagtcgcaggtacaagttcttgcaccagctcttcaaatgccatcggtggcattgcatcataacgttcgatccagccacaagcgagcaaggggcgcaacacatagaaatactttttaatcctcactcgctcaccttgtaaataatcccgaaaattaccctttgccatattgagataatgatacatacaggacttgggcgagaaggtcaaaggcgacagtgcacggatatgctgtgccacattatactgttcatcatactgaatcggggattgcagccactccaagagtggtggatttgatttgcgaaacagcttcaaagccttacgcagatcccaaccattaatatcgagctgatcactgatggggcgttcgataacatcccttttatcctcaatcgacaagtaccactccagcggtcttacatacaggaaacgcacatcataatcactatcctgtgaaggaaatccccaggctcgactgcccgattcacaggcatagataatccttacctgctcctcctgttcaatctgcttcagctgttgtctaatcgtatctctcatttcttcatgaacataggtcatggtccgccccctccaaattccccaatttaaatctctatctctctcacccggttcgcgagtgtatcatatcctgccacagtctcggcaatatacgtcaataccgattcactccaaccgtagatgtaaaaggtttttccatcccgtggcggtaccattgcctgctgataaggtgctatatccacaataaatgccttcagctccggattcatcatccgccgatatcgctcaagctcagcatataacgggctgccttcattctgctgttcatcggtgatcataatgatctgatccactttttctccgatatcccgtagttcccgcactggtcgaccggtgtctgttccaccttgtgcgctaatacggtgagcttgggaaaggatgctctcatccatcttgggacgagcgtcctcaaccatatggtcgaataaccagaacagtgcgttacctcttgtttgcttataaagcgccagtgccagcaccgaaccaatccgtaaataatccccttgcatggaaccggaacgatctaggaaaatagccgttcttcccggcagcgttggtaggttgccaatggatatctctaccgcttgtcgcaaagcatcccgcagctcttccctcgcaatcatttcatatgcactggcgaatcggaatggtaagatgcgcgacttacgcagggcttctgcatccgttagacgacctgttacgtaatcgatatttttcgatttttcaaaaactcccgcacgatccattgcattcagatggcgcagcaacgcaaaagtcggcatctgtgacattaacgcctcccacaccgtacgtgtcggttgcatgatcgaggtgaccaccgaatacgggagtttacctttctcgatcagatgcatccgacttgccgggtttggggtagctttcagcttttccagcgcctgcaactgcggaagttccgtaagatccacctcatgcccgcgcaaataacggaataaggcttgttgcttcgtatctatcggcttgggatgtgctgtagcgatcatatcgcccagactgtatccacgcccacgcccgttgtatttgatggcccaatattcagtaatgccgttcaaaaaccgactcacctgacgcttcaccgctcggccgccctgtccccgaccagttcctctgagaatggtcagaaaatcggccaagtcagccggtgtctgtaccaccttggagaataccttcgcaaactgatccgggtccactttggacagcagtgccagcccgtatagaggctgtaaccgcatcaaaccttcattacgagcatagaccagcgcccgcgccataaaccctgcatcgacctcagccatctcctgatgactgaccatcgcatcgtccatcagttgctgggtatctgcataaaaagtattgttcaatgtattggtcatcaacatctgtatatattgttcctccaccaatcgctcataggctccgtagcccccatgattacgtgtcgttggctgaggttgattaaataattgtttcgctctgctcatcactcatgacctcccggtgtgagtctatttgctgttctttcataataaaatgttccgaggaaaaaggtgggaaggtataatacccgctctaccgctgagctacaccgccatgaacggcggcgattggattcgaaccaacgacctggtcgattaacagtcgaagtaaccctccctggcgcctcggaaccttgatccacagcgcttgttgctgccccgcttcacaaccttattatgcctcacacatttgcacgcgaaaatggtaaaagtatgacgaccttcataactttaaaatgaaacctgccactcatcctgctacaatgaagggataacgaggagtgaatgttcatggcaagagagagttttgacaaagaaattcagttcttacgcatgttatccctaacaagcggtgcatataaccgcaaacaatatgccgagcggcttggcatatccgtacatacctttgataaaaccaatcgcagattaaaagaaatcatgcagaccgtcgccgaccaacgctcaagtgccgaagcaggccgggaaatggcagatctcgtccgcttccaatacggggagtcggcagagcctatgttgctcttcctcttccgcgccaagtcgatgaaagagactgaagttcagcggctttctgtccttttgcataccttacaacataaaaccctgaccgcgatggaactgctggacgcctgctgtgctgatctgccggaggatctggcgttacctgacgagaaaaccattcgttccgatctgaagtatctggaagaggttggggttatccgaaaagagccgggtggcagaccgtatcgatatgctttacaacaggacgtccttaccgaattgacagtggaggaacagctggagttgtatgattttgtggatatgatggcgaacacccaggttccttccgtacaggggtacttattgcgcgacagtttaaaaaaagccattacggcaagtttcccgcaagaagaagctaccgagccctatatctataagtatcactattattctcgtatcctggacgaagctcatctctacacgctgcttagtgcgattcgtcagcgcaaacgtgtgcagttcctatactattcaccgaaaaaaccatccagctacagttcacagaatacgaatccacgctttgaacgggaagcaggtggtcgatccaaccggatcgtgccccttgaagtgatctatgaccatcagtatggtcgttggtatgtaattggatatcagggccggcgcggctttgtgaaattccgcatggaaggcataactcagctggaggaacaggattcagtagaagagcaatacatgctcgaactgaagcagcagtggaccgacattagtcgctacagttggctcgtggatacgggaaataccgtgacggttcaagctcgctttttccacccggagcgtggtcagcgcaactttattctggatcgggttcgtctgcaaggtcaatggggcaaaattatacccgaaacggatcatacctttctctacgaaatccaggtcaacggtaccactgagatcaaaccgtggttgcggagttttggctcaagctgtgaagtaatcgcgcctcagagactacgccaagagatgatcaaggaatggaaggagattgcggaatattatgaacctgttcgagaagatgttcaattaccagatgatgacacgactgaatgaaaccggactgttcacctggacctcacaggaacgggcctggcttcgcatgatgctgaatcaccctgctgcgagagaagcgctgagcgttgtaacaatggataaaatgtacaacatgctgaatggtgagcaggacctgaaccttcaggattacctgactgaaaaagccaaaagcgaagaaaacaatgtctctcacccactgcttagacagttacggctaatcattctgcatcatcagggatttcgcatgacgggtcgcgtccgcaatggacgcacgagccatgatgaattcggcttcccgtacaaactggagtattccatggtcaaaaaagaatggtacgtgctctggtatgtgcctcgcttcgacaaactaatgtcgaccaagctgcacagcatcgttaccgtggaagcccaaccggttgaaccggatacagcttcgggttacactgcccggattgctgcgataacggagaagcgcaaaatggccatcaccatcgaggtactgcccgagttcaatcaggaactgtcccgaatcctctatgcattctcctgctttgagaaacaggtcgagtacctggaagccaagcagacatatcggatcgagctgaccgttccgcgcaatgagatggattacgtcttatccaaaatgcgttttctcggcaaacgggttcgaatcgctgaccacacagtgctacgagagcggatgtccgaaacagctgcgaaggcactggcacgttatgcggaaaaagatcctgatacgcactccgaatgctccaatgaagttcagcaccgccaacgtgaggaaggctcccttgcgaaagccgatggtcaatgattttgtaagattgggttaaccataactattgctcaaaagacaagtccatatccatatacgaaaaaaggtctggatcatctcatccaaacctttttttgcgatacttgcttgctcataaaaatgtcataaacttatcagcggaagtaactctattcgttccacttacgtcgctccaccactgctagctgccgagttccttcttttgttaatcgcgtgcacgcccatgaccactgcaattaattcatacgtgtccagttgttccgactggttatctaatacaaatgcccctgaactaaaccagccgctggtacgacggaaactggccacgatgcggccaccactgccacttatatcatattcctgcgaaaatgctggagcagacacatcatatgtaccgcgtgatcctgcgtcatattcatactttttactaaaaaaactgaatctcgcccgcaacacacccagatgtctcccatctgctgcagtgatatcccaacgattcgttaacatgcgaaatttgccgctacagaccaatcccgtgttatccgatacatcgagcgaagaaccaaagacacttttcaaatccagatgcccggcctgttcctggttcggattcataatctcggtgtaacccgcgttaaaaaagttatccctgaagtatagttccataacgcttcctcctttcgcttacatatccttttgttctctttaacctattctcgcatcaagcacacaatatatttatatatacgtataattaatggtaatggattcaaaaagtggattattactggatgtaaaaaaacgagcaaccctggttgctcgcatcacgttcaaattatcctgtcatcaaacttcgacttttttgttgttcaagtaaatggtagcccataccaagatgaccgccacaatgacttcaaatacaatgcttccccacatgccgtccgaccatagtacaccattggctgtgattgcaatacctgtactttcttccgtataccggaacatctcatttggactaaaacgtcctgtcgtaatgatattttccaaccagccaagcagattaacgaggacaaagaatgcaacgattccaatccatggccccgttctccaacggaagctgcctgcaatcgagatcgaaaggaagataatgacggtcatgaataccataacccatgcgctaaacagcaacaaactaatataatccgagacatgcagacccgaaagatcaatattggtagccatgttcattcgtagcttcattgagatatagatgtaggcatgagtcgcgaatataatgactaaccccaacccgcaaagggctccaaagatcaagggagacaacacatgtgacaggcccgttacgggtaaaaggcggcgattatatgatcggatattggacgtgtatgttttgatcattttcacataaatagccacacctactccaacatatcccataatgccaagcacaatccctgtgacctcagacacgaaaagggaaagtcccacttgcgcgataatcaaaataactagcccagccaacagtgtattccagttccttctaaagtcatatttcaataatgtcatcattccgcatagacctccttgaacatctcatccacacttttcccatatttcagacggagcgtttccacttcttcccgcatcaccaactcaccctcgcgaataaagacaacttcatcaaaaatccgttcgatatcattcacaagatgcgtggagatgatcagactgctgtcttcatcatagaatttgacgatcgcatccagaatcttgcctcgcgcaaccggatctactccgccaatcggttcatccagcaaatacagacgagccttacgagaaagtgccagtgttagttgtagtcgttcattcatccctttcgacagatgccgtacccggtcactctcgacaaggttcatgaagtccagcatctcccgtgccttctcctcatcaaaatcagcatagaaatcgcgataatacgcaatcgcatcccgcactctcatccacttctcggttaatgggcgatccggcataaatgaaaccagcgccttcgtctccagcccaacaggcttacctgtgacttgaatcgttccgctgctcggatgcaacaaacctgcaaccagcttcatgagcgtactttttccactaccattgctacccagcagacctacgattcgtcctggagcaatatccaatgtaatattactgagcgctttcttattgccatatgtcttattgatctggttcagttcaaggatgttactcatgcgttgttcctccctttccttccgcaacggcatcggctacgatggataagatatcctgctcttcgatccccagttcctgcattccggtcagaaagcgttccagcaattcaccggccatctcttttttgatcgtcataatcttccgctcctcactggtcacatatctgcccaagccccgtttggtttcgaccacttcttcccgctcaagctcctgaaatgtccgttgtactgtatttggattgatctgtagttcagccgccagttcacgaaccgaaggaattttgtcacctgcctgaagtgtcccggttacaatctgtctcttgatgtactgcatgatctgcagatagattggtaaattgttatcaaattctatagtcacaaagctctcgctcctctctgtactggtgtgttagttacatagtacactagtgaaatagtgttgtaaagcccatttgttaaaatatatattcgctcaattgatgagcaagcttgtgctatcgatatccagacaaaaaaagagcagatcgtgaagatctgctctgcttaactttattaaacgtattgttatcttattcatatgcttatccaataaaaaagagccagctacacgatatctagaggtactttgcctttaggtgcagggaatgcctcatccaaacgggcaagttcctcttgtgtcaaaacgatattcactgctgctgcattgtctgccacatgattcagctgtaccgccttgggaatcgccagcacatctccatccctgatcacccatgctaatgcgatctgcgaagtcgtaactcctcgatcctgcgcaatcttctgaatgacgggatgctccaacaattcacttcgaagtctgccaccctgtgccagtggacaatacgccattacaggaacgctccgttcccgcatccagggaagcagatcatgttcaataccacgcgaagctgcatggtagagcacctgattcaccatgcactgagacccctccggcagactccataactcctgcatatcccttgtatccaggtttgatacaccccagcgaatgattttaccggattgcttcaattgttccaaagcctcaaccgtctcttcgagcggtactcctccacgccagtgaagcaaatacagatccagacgatctgtaccaagacgcgtgagactacgctcacaagcggtaatcatctgcttgtgatcagcatgatggggatacactttggatacgagaaaaacttcatcacgatagcccgcgatggcctttcccgtaacaacttctgccccaccttctgcatacatctccgccgtatcaatcacggtcattcccagttcaataccggaacgcagtgcgcgtacttcttcttgctggctggattgcttctctcccatgttccatgtgccttgtcctatcgcaggcaggacagttccatccggaagtagaatcgtgcgtgtttgattaccatgcatcatctatattcctccattctgaagactctatggacattgtgacctctctaacgacgactatacgaatcataaatcatgttatcactcacatgtctccagtggctcatcatcatgatatacaattgatccagtggcactgtgaggctactttgggcaacgctgatggtcgcatcgaccatattgctgttgaccgtcattaatttgcgtttcatcccgttctggcgatccagaaaggctttctcgtcccgcaatttgaccccgatcattttctgtcccatcaattcatacataaaaatattctcaacgtctttccaggccactgctcctcctgcggtataagaagatgcatctacaaacccatcctcatcgattacaaaagaaggttccttcttaatcatctttaccagactgtagcagaaacatagcccaaaaaacaaaatggatagaagtccaatcacatccgaaaggatggaatcattcgtaactgaagaacgatcaaaaatcaaaaaaaatccggctgccacaaaaagtgctgcccctgccgtgagccacgccattcgtttccggtttggatattccacatgctgctgataggatgtgctcaacgtgacgttcctcctccattgcgactgaatcatacaagttctatataaacgaatggttatgaaccaaatacctgaatgtagaacaggaattgcattgtacattaaaccaaattaaccaatgttaaacattgaattaagaccatttttcgtcatttctgcgcttattcaacattaggattcgtcatccttcgagcaaatcctttaacacacctatatgaattgaactaaagaatgtttgcatgggtcactccgatgacagaacaaccttccgatcgctgttataaaagtctcccctcccatccttagtcatattgtcctgtccctagctttccgttaatataaatggaaaggttaggaaattaaccaattctaattcatggtgggaggacaaacaatgatgagtcagcgcggcataacatcggaagatctttatcagattacatgggttaatgatccaactccgtcccctcaaggcggacaactggtatatgtaagccggaaaacgaatgaagcacgtgacggttattgttctcacctgagactgctgcatctggggagtcagaaggacaggccctttacctctggtgagaaggatcattcccctgcctggtcgcccgatgggtctcagcttgcctttttaagagaggttgatgggaaatcccaagtgtggattatcgcatcagatggcggagaagcacagcaaatcagtcacctgaaacatggcgtcagttccctgctctggtcaccggacggtcatactttgcttgtgaaatcatccgtggatatgagcggagatgaagaatcagaacatacagatcctataaacgacaatcccaaactgctgcaagaacatgtcgtagaccggattcgcatgaagtcagatgccagtggattgtggaacggtcgacgttcccaccttttcgctctcgcaccgatcgatgcggaagcaattcctgtaactacaggtcattatgacgtcggagactacgcctggtccccggacggaacatccatcgcttggattgcgcagatgcctgaagaaggcgaggaacatagtgattacaccctgactaatcatgtgtaccttgccaaggcagacggatcggatgtgcagcagttgtccccggaaggatatacgttcagccgactggcctttgcgccggatggacaatctcttgcactgctcgccagtgaccgttcctatggaaatgccacacttgtgaagttgtacacccttccaatatcaggtggtgaactcgtatgtctgagcaccgattgggacgtacagttgaatcacagcattgttggcgacatgcgatcacatctgacaaccacggggccagtattcagcagggatggttcttcaatcttctgtctggcgactatccatggtagtgtacgcatcgccaaattcgcacgagacggcagcagtgccgactatatatggcctgacgaacgggagatttatcaatttgccgagttggaaaacgggcagatcgttgccgctgtagccgatacactaaatcctggtgatctctatatgtatgaacaaccggaagatcccggagtagaaccgattcagctcacccgtagcaatccacagcttgaggatgagatccaccttagtacacctgagaccttctggtttaattcctcagatggcctgcgactgcaaggatggatcatgaaacctcatggcatggtcgacggggtcaaaatcccgaccattctggagattcatggcggcccgcacatgatgtatggttttacgtttatgcacgagttccaaattctcgccgcacaaggctacgctgttgtgtatatcaatccacgcggtggcctcggatacgggcagcagtttgtagacgcctgtcgcggagattatggcggtggcgattatcgcgatctcatggagagtgtggattatgccctgtcccagtatgagtttatcgatgaatcacgattgggcgtaaccgggggcagttatggtggcttcatgaccaactggattgttggacacacggaccgctttaaggcggctgttacccagcgttccatctccaattggctatccttctacggtgtaagtgacattggatatttcttcacggaagaccagattggcggtaacgcgtgggatgacacggaaaaactgtggaaacattccccgctcgcttatgtcggaaacgtcagtactccgctgctcattttgcatggcgaacaggatctgcggtgtccaattgaacaagccgagcagttgttcattgcgctgaaacggcgcaagcagaccaccaggcttgttcgtttcccaggtgccaaccatgagttgtcccgtggaggtcatcctcatctgagggtacgccgtctggagcatattgccggatggtttaacgagtacctgtaacggactaatatttagactattagttcagattatagaaccagatatggatacaaccctaaaagccgtccaatgaaatctgttatgatttcaacgggcggctttggctgttcaccttttatggaaggaaagattactcttcgccccacactacggtgatttcattcagatccttgttggttgcagacaccgaacctgtgatggttacggcatatttgccatcttcacgacccacaatgctgaagccatctgcctggatatcctgagtgttctggctcaagtttttggtctggtagtagtctttgtaggatgttccaacggttagcaacgtttctttggttgtgtacgtgagcactacttttttgtcaccatccattatgttctcaatgagacttgttgccttcgcatccttcggtaatgggaaatcagccggaagatacttggactttactcctgccgcctgtgtgtttgtacctgttgagggcgatgtcgatccgctgttgcctgtggatgttgacccaccagaagagcttgaagaaccgatgcttactttattgttttgggaatcatacttcacttcggtctttaacgcatcggcaatcgaacgaacggggagataagtactgccttgatatgtaattggcgcaagctttttgccctggtcacctgtcggtgtaaatttctgtccgttcacttcgatggcgagcccatggttcagataagctttgattgtctccagttgtgtacctgcatatacacctgccgatccggttaacaccatgccaaacacacccgcagcaaccaaccactttttgcttttcatctctaaacgcctcctgagttcaaatgtcagccttatgcataatacgattcaagacgatcgctcgatgtacgcgaaagactcatgtagttatgctcatcatgtatgggtacgagcttattcagataacagcccgttgttccaccaaatgttagcaatataatagcatctgacaagaggttgtaaacgataaatggacaaaacaggaccaagggcgtacaaaaatagtctttgtcgtatgcccgctgtactctcgctcgttaagttgttcttatatgaataaagtcctgaattccggaccatacatatgaagctaatcatacacgcacaatagttgcgaaattaaccaatgtattagataattatttgtcgatttgtggtcgaaggaacggaactcaagggggattaaatacgatgaacaacaataacagcacatttgaccagcctattaaccggatctctaccggatcagaaaaatgggatgcgcttgaggatatcttcggagccgctgatgcgcttccgatgtgggtggccgatatggattttgctgccccaccatccgtcattcaggccctgaaaacacggatggagcacggggtttttggttatacagtacggactgaggcgtatcatgcagctgttgcaggctggatggaacggcgccacaactggaaaattaacgatgactggattgtattcactccaggtattgtgcctgcactcagcattgctgtacaacgattcactcaaccgggagatgcagtggtcatccaaactccggtgtatgctcccttctatgaagtagtacgtggtcagggccgtgaactgatcaccaatcctttggtagagaataacggtcattacacgatggatctggaacaactggaatccagcttacagaccggtcgggtcaaaatgctgattctgtgcagtcctcataacccggttggacgggtatggactcgtgaagagcttgaagggcttacgtcattgtgtctgcaatacaacgtactgatggtttcagatgaaatccatgccgatcttgttcatcagcgcggaactcatacaccactgaccctgatctcggacgccgtctctgatctaagcatcatctgtacggctccaagcaaaacgttcaacattcctggcctctgcacatccaatatcatcatccccaatgccaagttgcgggaatcgttcgcgcagggtgtaaaaacgatgggacttgccaatatcagcacattgggggctgttgcaaccgaagctgcttacaatgatgccgaggaatggctggatgagtgtcttgcctatatccgtggaaatatggagtatgtacagcaatatgttgcggaacatatgcctcagattaaaatgcatctgcccgaagcgacctatctgttatggatggatttccgggagctgaatatctcacatgcacaactatgcagtatgcttcttcatgaagcagggcttgctttcaatgacgggagcttctttggaacagagggcacagggttcatgcgcattaatgtagcctgtccacgttccacggttgaagaggcgatgcgcaggttatctgtgttgttaagcaatgtgtcgggcaaataagctgtcagttacatctatgtacgttgcgaacaaaacgtgtactgtttgttaaatggtgaatatttgtcaagatagaaaaaggggtgccccgtagtcaagtccatgactcatattcatggtcaatgacttcacaaggggcacccctttgtattcgatcattttatttattcaaaacataattaaaattacagtcacatcgatatcggcatcggtgtaattctgtcgcacaacctgttcagcaaatcccgatcatggcttatgatcagtaatcccagatcacgctggcgagccacttccatcacggtatgccagatctgtgcctgagtgatcgcatccagcatcgttgtcatctcatctgcaatcagataacgtgtcgctgtaccgagtgctcgcgccacacagaaacgttgcagttctccacccgataattcactaggcctacggtccaaccaggtctgctgaatacccaatgcttcgagcaactgttcatcctgcacagacgcctcctgaagtacacgacgcattcgccagcgtggattcacagctttctccggatgctggaataccagctgaaccggaaatactcctgtacgtgggagtggattcccatccagaagtacttgtcctgctacagattcggcatatcctgcaaggatgcgtccaaggcttgtttttccacagccacttggtccccacaagccaacgacttcgccttgtttcacctgcatattcatctgctggaacacccacgatttcggatcataacggtaactcacgtcccgtgcttcaagtgacatggaaacacctcacttctccgcctcgtaccttacgaagttctggacgttcgcgggtacatacagcggttactgcattacatcggggagcaaatgaacatcctgtcgtgatctcttgacctgccaacggctgggagcctgggagtggctgaaatccgttctgcggcaacgcattccagagcgctttagtatatggatgacgcagacgttctccattccctttaaaatcatccacctgcgccgcttctacattggtacccgcataaaatacagagatgcgatccgctgccgtcagggctgtcgtgatatcatgggtgatccatagaatgcctacgccttcattcgcaagttcgcgaaattgcttcatcgtctcggccaacacttcgggatggattcctggtgtcggctcatctgcaatgatcagcttgggctgacctgaggtcgctgtagccatcaacacccgccttgccatacctccggacaactcaaacgggtactttccggctgttccttgaggaagatgataacgatccgtcagctcctgctccgtctttttcatataagatcgagttatgaagcctcgtttctgtctggaatctcgggttaccggctgaacttgctttcccaccttcatcagcgggtccaaataactgacggattgcgggattaacatcagctcctcaccacgcagatgaagttgtcggtctggggtcaaaggctcgccactatagctaatacgtccctctaacctggcattggcaggcagaatgcccatgatggcctgcgccagcacacttttacccgatccacttgcgcctacaacagccacgatctcgccctcgtttatggaaagatccagattctgaatgacatacgtctgttcatgcctaaaccaaccacgagcgcgccgaaatgacaccgacactccctcaatatcaagcagagccatattacctcacctcccttgaagtacctgtacccgtcaatgtcttcagactgttgcccaatacatcaaacgcacgaacaaccagcaacaatgacagtcccgggaaaaaggcgagccaccacatgccagcagataaatatctcatcgactctgacaaaataattccaattgccggttgttgcggggacaaccccagccccagaaacgtaatggctgcctcatgcagaatcgcatggggaaagattagcaatatgcccacgaacagctgcgggaccagatgtggcagcatatgttgcatcgcaatctgtaacctcgattggcccaacttgtgtgaaacctgaatgtattctgcggatttcagttgaatcatctccgctcgtacaatccgggccaaattcggccaatgcgtcagcgcaatcgctgccgccactcctgctaaacctccaccgaatacaaatgccagcataaccagcgataccagatgaggcacactcaggaacaggtcgatcatccatgagattacccggtcagcagccttgtttgaagcagcagccaaacccaatagcattgcgatcaatccgccaccgcatgcagcaagtaatcccacttgaatgctggttgccaatccttttaatgtacgcatgaacatatctcttccgagccaatctgtgccaaatggatgcgcccaggttggagccaaattccgatccattagtgaagtcagcgtagaaccagccggaagcaacctgcccgtcaaccacacaacggcaatccagatcaccgcgaggcttccccagatcaccgctctttggcgagggttgcggaaattttggtctctggcagccgtataatcttttctcgatgggcgtgaggttcctgttccattcccagcttgtagagacccggtattaatgttgtaccgtacctcttgattcgcagttttcactttctgtattttggctgtttctgccgtctgctcggaggagcgttctaacgtccgcttcatgacatcagctcctccttcatccgtggatcaatcaagcgatacagaatgtcggcaaccatattacctgtaaaaacaaaaatcgcactgcacatcacaagtccaagcagcagtggaacatctccacgcaaccccgcctgaaccgtcgcctgaccaaggccggggtatgaaaatacctgttctgcaagcacagccccaccaaacagttcactgaacgaagcaaactgcagcgtgatggctggcaaaacaacatgtctgaacccatgtcgacggaacagctgaaatccacgctcacctcgcgctctcgcaaacagaatataatctgactcgagcacatctgtgagcttctgccgggtatgcaaagcaatagaggctaccccggtcaggctgagagtcaacgctggcaaaatcatatgaataacccgatctccccatgtaacctgatcagccgacatccctgcgggtaccccaaggccaactggaagccatccgagccacaccccaaataccatcagcagcaacaacgcaatccagaataccggcgtggaggccagcgtataacaataccagcagatcaggcgatccagcttcgaatcccgtctcatggcagcaactacaccaagagtgaaaccaataatgccggataatatccaagctacagccataagcgcgacagaattcatgaaccgttcctgaataatatccgctacaggctgtctgtagatcatcgaagttcctagatccccctgaataagcgcttgtccccaagtcagcaaccgttccatgggagattcattcaatccccaacgttcttcgattaaactgcgctgttcggcgcttaccctaatcatgtctccaccaatgtaggcttcgatcgggtccacaggagagaattgcattaatataaaagacaacgcactgactccaaccaatagagatacaagtcgcaacattttaaaaccaacaaatctcgcccatccattcctgcctgtcatccaatctctccccaattcaggctaaagctaccggtacgtttcctactttgtactgttatcccaggaccattcctccagattggttgtcaccggccagccgtgaccatgggggtggatctgctgctcaccaatgttcaggccattcgtaaccagatacagatgatctatgttcacaagccacgcccatggcgcatcaccctgataactgaaacctgttgttccatcccattccgctttctgccagaacggcaatgcctcttcttcacttgttgcctgaagggctttgtccatccaagaatccacgacaggattactgtacagccccacattgtaatacccttctcctttatgagtactgctatagaggttataggtttccaaaggatcatgactgccccacccaaacaatacagcgttggagtaagccatcttttttgtctcttcacggcttttgccttcaacattgattttgattcccgcctgagctaccatatccgcagcagccagtgccagagattgtcttgttaaatcacctgcaaaataaagcagattgaattcggccttaacgccgtttttctcgacgataccatcaccatccgcatccacccagccaccagacgccagaatgcgcttcgcttcttcgagattggcatctgtaaatacagcttctgcattgctccaaggcagatcatcactgacggaatacgctggacgaccgtacccttccagtacaccctcaaccaaagcctcacgatcaatcacaacattcaccgcctggcgaatcgccagatcagatgtcacatcattcccagcgggaagaccatcgcccgacttggcaccagcaggttgcatggggaacatgatgccccggttatctacggttttcacggcctctaatgtcatgccattcacctgttgtttgctaaacgctgccgggatagcagcgatatccaccgtacctgcctgcgcagcggcgtaggctgcatcttcatccagatagaggaaggtgagtttgtggaatgcagacttgttaccataatattcttcattcgcttccacgatggcctgttgtcctttgtcccactgaaccagcttgtacggccctgatccgaccggatgttctgcataatcggcaccataggcgtgttcaggcacaatgccaagtgtcgtcagcagactgatgaatgtagactgcggcgacttcaatgtgaatacaaccgtgctatcatcaggtgccttcacatcagccatattcgtcaaatcaatgacagacccactctgagcagccgtatcaaacgtaaatttcacatcttcagccgtaagtggctccccatcagagaatttcacatcgttccggagtgtaaccgtccaggtcaggccatcttcactaactgagtatgccgtagccagatcgttaaccagttgtaacttggcatcccgcttcagcaaggtactctggaaaagtggtgacccatattgcccccatccggttgttggatcaaacccgccttccggctcggtgccaacggccagcaccaattcgtctttggttaaggctggaactgactgtccattctctgctgatgaagctgttggcgctgtgctctgtgcacaaccagataaaccaatggaacatacaagcaaaatgcctaatccggttctaccttttcgttttccccatctccatgaaaatctgcccattctggtcgttccccctctaaatatgtgttgcactcccttttatcgtgttactttttagagaaattgtagcacaaaacacaaatcatatgtcaacaaagttaacttcgtaatccatattttttcatatttcagaattaataaataaaaaattgtataaccgagcatttgtagcgctctataaagtcaggtattataacaaacaaaaaaacagacggttggcatctaaccaatagtctgttttttagatttgctatattttcatagaaattacactcgtattcgtatttgtcttactcagcagatcgatgatgatggctgtgaccatgctgacccacactgtgattgtgatccagactttgatccggattgccatcctgacgactctgagcatgaggcagtttgttgagttcatctacataagtcacagacagctccgcatacaaaacacctttttgtacctggatctgttgatgcagatgacgcaatcgccccagattccctcgtacggcaattacctccaggcattggtcatggttcaggtgcacgtgcatattggaaatgatgtcatgatgcgcctcatgctgcagctccatcaaacgaatgggaagatcactgatatggtgatcgtagaccataacaatggtgccggccacatcctgatcggattgcagtgcagaaggttgcagtaatgttttgcgaacaagatcacggaaagcctcagatcggtttttgtatccctgttcctcaatatactggtcaaactgctcaattagaggtgtagggaacgccaccccgaaccgggtcaaatcttctttatctgccatacttctcctcctgcgccctcatttgcttcgagtgtaccacagacttgtctgctcatcgactatactgttgcatgaatcgtactgccgaatgtatcgcctgttgtccagcgtcactctccagatcaaattgataatcatgtcccagcttctctgatgagtttgagaaaaacaaggtttccacctcaacatcaaggcgcttcaatacttgtgccagctcaatcgattgactggtcaacgggtcatcattgcctgaggtaatgaatgcaggcgggtactctgctgtggcctgaagcacggtcgacatttcatgcagacgtggatagtcttcgaatgttttgactcccgtatatgaccagagaaatgtccgtatgagtggaaagcctgtattggctaccgtgcttagattgtatggaccacagaatagcagaaccccacgcaactcttccggctgggcggctggtgttatgttcatcagcttggcgagagatggattggtcaccactgccgcagtctgacttgcaatctgggcacctgccgaattgcctgcgagaaatatgttttccgggtcaccgtgatactcactgacatggttcttcacgtaagtcaaagcctgattcgtctggatcacgggaatgggatatttcgtatccggtgcgagcgcataattcatactgaccacaacgtaaccctgtttggctaattgtacggcataatctgcgatatcctttttgtcacccaagacccatccaccaccatgaacccacaacacaacaggcaaaggttccgatgttacggaaggataatagatatccagtgtactgtcattacgcccttcgtctgcatagggtacatccgcaacacgagttatcccatccgagagcatagtgtccttgctatttgtgtctgtattagtagtttcaattaatgattttaataaaaacaccgttattttgggtgtccattgtgtaccaatcccaataaaagctatgatcaaaattagtacaacgctgggaatccagtaacgtttacgtttaaaaccttttgccctcgtacgtttcgtttccaacttggactgcaatagtttcacctcgttccatcatcatcgaagcgtctttacatctaaagttgtgtacgttgcggagaggaccgggtttcctcttatttgggtctcttggcgatttcctgtctgactttcacatacgtagtggatactttttgctccagtgtgtggatatgttgttttgtgcctgcccacttctctgctgcagacgccaaggtgttcaatgagctgagtacacgtgacgtttggctttgttttgtactctgtttgaactgttgtagagctttggaatatcgttcttttgccagactcgcctgttttttagccgtttgaatctgtttcttcgcggagtcggcccctgctagcatagctcgtaaacgttttatttcagcgctcttccgtttacgtgcttcagcaagttcctttttcttgatccggatgtcttctctggcaagcttcacaacgggtctcaacgtctctgcctgtgtgcggatcgttgcactccattccttatttttgatggctttggctgcatccaactgtcgattaactgaactatagagggcgaatagcggttcatatcgggcctgtgtttgctttaccttttcagctagagctgcgaccttcgcatcatcgatttgtcttatttctacacgtaatcgctccaattccgcggtattggcggcatgaagtgtctttatcttttgttcccaaacctgctcttgagccttccagttccccactttctcgtacgcttgcttcaacgttaacttggtttgtgcatcagctttgttcaaaacagaatcccatgctttttgcgcggttacgccaagatctatatccgctgcctcgactgaagaagcaaaatagatcgtgcctgcactgaacagaatcacaagtcctataagcaggcgtgatccgaaaataagatgagtcatcgatggcaattgacgatgccgtacgttacttttttccatcatgtgactatggctacctgctattggagaagggaatagaatgtcactcgtctccattaaagctatttcttctgtagatatatcttcgatatgctgtcgccccttcttctcttctactaaaccgtgatgttctatgaagttatgagagcttgatcgttccaatagggaacaacataccatggcctccggttcatttatcgtttccttccatgcttctgtttgcatgcgtctctacaccctttcttctaaaatatttagcagaatagcccacgaaatcagcgaacgacaaaaaagcacccgcaagtcaggcatttgcctgctcttacgggtgcttccctcataagccgttccatatgagattcgattgaacgagtcgctcgaacctttcctttttctaatatattccattcactgtgcctggtcaagtaaatctggtttcactggttgaataaaactttcgatcaacgggagaacccttcccgcttatagttaacaactgatacaactcagcttattgattgaccaaaatagctttcatttcctcggtcagatcctcttctttcaacatcatatagatgttcgacccccttaccgagttaagcttaatttggtagaccgtatcctgatcggtgtaaaaaccggttctttgtcgcagtagcagatcgctgattatttttttgtttttggtagcgacctgtctgttaccatcgatatttacatccacaaaattaggctcaggatacaccattctgtatttacctggattatcaatctcctgtttaacaaattgggcagaagccatatcctcagccgataccgtaagttgatcatagagattgttctgtttgagccattccatcaagcggccatagcttgccttgaactgataactcacactgtggctcggtcgatccagcttttctttggaagatgcttcatcaagataatcctgatagacttctatcgaagcgaacgattcccatgaggatagctggtcctcatatgtctgattgagtatttcagacttcaaaagttccttgaattcacgaatcagcttaggatcgctaatgaatactttacgctccgagttgagactggatcgaataccaatactgcgaacatcttcatccagtgcataggtgtcataagtcgttgatttataatcttcccactgtttcacctctgctaattcctgcctgaattcttcttcgggaatctgatacctacgtgtcatcgttttcccattattgagttggtagtcgatcaatacatattcatcgttgcttctgttctgaccgctgttctgattacgtactctttcgagcaagggcagatcggagtgcacaattttctgatgcagtgcaagcacagcatccacataacccggagtatctgaataaaatgggctaccatccagttttacacttttatcattcacatagatgtaatggtctccccccagtcgtaccatttgtacattttcctttgagggcacattattagcgtaaccgttccaatcggctacagggatatacaaaattaatcctgccacgataccatatactgcaaaccgggggagtaacctgctgctccagatgagccatgttttacgtataatcatctcagcaccaatataaccaaccacaccacctagcagataaccaaagataccccatacacctgatccttcaggagcaattctggtaaagtaggcacctcctaataataccaatgtgaacatgaatccaaaacggaagatgggtttgacgatcctgaacgtaattgcttgtgtcgccgactctacatgtcttctcgcatacagcacataacacaacacgaagagtatacaagttatagccgcataaattcccaattccccccattctggaggataataacccatagagctcattcggaagagcagggatgttttttccatgttaaagttactcgaattattgtacgtaaagccaagcaaataacgttgtaaatgaagctcataaactccccaaaagatcaccggaattaatattagaccaaaaactgtaagtccttgcagaatagattggcctatacacattcccacggcaaccgtcagggtaaacataaacaatgagaagatgctcatcgtcacgccccacatccagatatcatgaccactgaaaatataggatggttgatcgagcaccgcccatacccacccggtaatcccggtggttatccagatcggaagcagaatcatgacatatccggtcaacagattcatcgttaacagatgtttacgctgtaagggcagactgtggtataaatccgcaggcgcaccagtttgaatatagcggaagagaagcagcgctatggcgacaggaaaggtcagcgcaaataccagatgaatttcattagcctgaaacagactggtgatttccagaggtacttctatatattgtgttccaatatatagcggaagtgagaacaacaatgtgatgagatataaaatccctatccatccatgttgtctgaaattttggatcaggatgccccggttacagaacaatcggttgaatatcataccctgcgtcctccatttcgtaaataaagatttcttcgagcgtcaaaggcagtacatccagcagatacggatcatgtacacggaattgatccgttacctgttgtcggttgcctttgacaatgtacagggatacacttccccgtttctcttcatgcaaaatatcaatctgctcatccatggctttggcatggtccgggtggcggaatgcgacttggattttatgcgtatcggccttcagatcatcaagatccttctctacaataattcggcctttgtgcataatcgccacatggtcacacagatcttcgatctcacgcaagttgtgcgacgagataacaatagttacttgacgctcagctgcttcctggaacagcaagtttttgatctgctggcgcatgaccgggtcgaggccgtcaatcggctcatccatcagcagtacttcaggcatacagctaagtcccagccatacggctgcctgacggcgcatgcctttggacatacgatgtaacttgcgttttacatccagtttgaacacggtagccagttgcttgaaccgttcctcattccagcgcggatataccgaacgataaaatgcagccatctgagttattgaagattgcgggaaaaagtagggtgaatctgccataaaaattgtgcggcctttgagatccatattttcataaatctcattatcttcgatacgaacagtcccgctgtcctgacggtaaataccagccatcattttgagcagcgatgtcttgcctgccccgttggaaccgagcaaaccatagatcgaccccttatgtatgtgcatcgttacgccatccactgccttttcctgttcaaatgctttgacgacttgattcagctcaatcatgaggctcctccttctctatacgggccatcgcttcctcaaacaaaagcgtcatatctgctttggtcaaaccagaatacgaagcttctgcaatcaacttcaccagagactctctgatctcatctctcatggcttcattcggatgttccactgacgatgatacgaagctcccttttccctgcaaagaataaatgtaaccttcacgttcaagctcacgatacgctttctgaatcgtatttggattcacggtcagctgcgtggataacgcacgaacggaaggaagctgctcgtcgggctttagaataccgtatacgatcatttctttgactttgtccactagttgctcgtagatcgccttacggctgcgtacatctaattcgaacatcccgcacctcctttctgtaaatgtgtgaataacctatgggtttaaatgactgtatctgaggtgtatgtgtagttatctgggtgtaaaaaggcattacctaagctgtacagctgtacgtattcaactcttaggtgtattaactgtactactattattaatacagttaaaacgaattgtcaaccgttgactttgacttcttgttttattgggagtacgttaataaagataggttatatggtttaaatgacatatataatttggggaagcaggttcattccggcttacgacggggctcgatcagggtggcgttcacatggggtgaggcaaaacggctatctgaagcgatgtggctagatgtggctactcgaagtgatacggctacccaaaatctttgcttgaccgcttttgacagaattacatgcaaatgttgttcaggtctttccccttccgttatgatggagataaaattatgttcagtaatcactgtatctttgttacttttttgggcgcgtctaatctgaatgattgttgggtctgttatgcgttagttgtgttgtgttgtctcgcgttatagatctattgtctgcacaaacggtaggccttaaagtgggtagctatatcagagttagcaaaactgtgtatttgctttaaattcgggtttgcacaaataagctactatgcagtcgtcgagtgtagactggaccgttattcatttggcttgttggtctaaaatcctaaggctatatatgagtcgcgttggatgggtcgggcagactccagccttttcaatcgtttatctgtttggagtgccaactcgtgctgtccgcactgagcatacatattgcatatttgtctttcaaagggtggacaaatatatgcccgaattccatttatataagctgaactatacatttacacgaaaatacagaagtaagtagtaaccctaagaagtgtaactagaagcttgctgtaagaaagatactatggaggcatatgttacacttctaatacctcataaggagaatccgagatgaatgaacatagacaggataaagatcagaataataaagcgaacgcctcattcgagactagtgaccaacagggagaattaagcggggcaacaacgacttcagataccagtccggtacaagcaaattcatcacaacgtgtgttaattgtaaccgcggttgatgcggagaaagatgcggtcctccgtggtttgggagacatggccgcggaacgatttgacgtcatcgctgcgggcgttggcccagcctcggccgcagcaggaacagccgctacattggcatatgccgtagcggctgcaagcactagggcgttggcgcagggttccaccgcgccaagcccatccgatgtggcacaggcatctgccacatcttcaaggccgggcccccttgccgggaccggtagttcaccagcctacatgctggtgatcagtgccggcatcggcggcgggttccccggccgggcagacgtcggctccctcgtggtagccgacgccatggttgccgccgatctaggctcgcagacgccagacggcttccttagtgtggacgagctcggattcggctcgtccattgtggcggcggacgcggagcttgccgctcgcctgcgccatgagctgcagcgggctgggctcgctgtcagcggaggcactgcggtcaccgtgtctacggcgaccggaacagcggagacggccgcggagctattgcgccgcgtgccggatgccgccgccgaaggcatggaaggcttcggcgtggcaacagctgcccagcagttcggcgtgccagcactcgaactgcgggccatatccaacgcggtcggtccacgcgaccgcgacgcttggcgcatcaaggacgccctcgatgcgctccaggctgcaagttccattttacgggaggttattacatcatgaaaattgcattttccccttgtccaaacgatacatttatctttcacgcgtgggtgcacgggttgatcccgggcgcacctgagctggatgtccgttatgcggatattgatattaccaatggtctggcagcaaatccagatggacccgacacacctgaagtgatgaaaatatcttatgcagcactgccatacgtgttgtccgactatgctctgcttcctgctggaggcgcacttggcagaggctgtggtcctttggttctgaccgcaagtggcacgaccgatccagcatatctgtctggacgacgggttgctgtgccaagtgaacgctcgacagcatatctcttattccgtctgtgggcagcgcaaaatgttccgggcggtgtaggcgagattgttgtcatgccattcgaccagatcatgcctgctgttcgtgacggcaagatcgatgccggacttgtcatccatgaagcacgcttcacgtaccagaactatgatctcaaactgatgacagatctcgggaactggtgggaaagcgacacaggccttccgatcccgcttggagcgatcatcgcacgtcgcaacatggatgctcatgccctcgccggatgggcacgcgcctccgttgaatatgcatgggcgcaccccgatgagtcgagagcatacgttatggaacatgcccaagaaatggaccctgacgtagctgcacaacatatcggcctgtacgttaacgagttcagcgccaacctgggtgatgatggttacggtgcaatcactgcactgcttggccgcgccatgaaagaaggactcgttcccgagttcgaccttgatctgttgcgaatctaactttgatttaatttgagttagtttctcttcgctctatatctaaagaacccagcgcaccttatctagccgaataacgtagtatgagaattctaaagaatctcagacaccgtattcggctaaatctcgttcaaattgccgataactctcacactcaagcacaataacgatcttacgattcgttagaaattggtatgtgcagattttcctagaatagcgtgtgctcggttcgttagagttcgttccaagacgctctgaggagcaagcttcgtagaagcctattcggggattcgaaatttaagtggtttgtaaaagtagacttagggtgctacaaattcgcagtttttttctcttacgaacccagtgcaccttatttagccaaatatcatgctacgaaaattctaacgaatctcagacaccgtattcggctagaattcgttcatatcaccgacaaactcgcataatttcgcacaacaacgatcctacgattcgttagaaattggtatgtgcggattttcggcgaatagagtgtggtcggttcgttagagtccgttccacagtgttctgaggagcaagcttcgtagaagtctattcagggttttcgtggatacaaacttcttagctagctagggtgatgacggtgtcctagcgtcttgttttgtaagagcttggttacttcgggttaataaagtttgtattcagaagcttagaaggctcacgaatcggagtctacccttaaactcccccgcacctatttcgctgaatctctactttccagcaaaagttatataagccttaccgggtttcggatttgcggtttgcggtttgcggtttgcggtttgcggtttgcggtttgcggtttgcggttttagagtctaatctttaaactaggcaaaaaactttcataaagatacttgcctcaaactagtgacctcactagccatgttggactacactacacatgacacacgaaatagaaagagctgtcccctaacgtcagacttaagacgatgggacagctcttttttcactttatattcaacttcatatttatactcatatctatcactctactcaaccccagatcgaagcggaaggaaacccatgcaactccaagctctccacgtcatcttgaaccctactgtactccatcatcccaccccactgctctacctctcacaactgcggtctacgaatctaaccctcgcctacgttctcctgcaaccgcagccgaacgatcgcaaccatcccctacgaatcagccacaaccgtgcgaatcatgatccgcagcgcatccagcatcttgggaataggtagcgatgggacggaaggctgcaacacagccatctctgtagaggctggaaaatgtacaaatccggcacggatcggaagctgccctacacgaatatgatctagaacccggtacatcgtgttgttgcagatatacgtgccggctgtattggagacggcagcgggaatacctgctgccgtcatgtcattcaccatggcacgtatgggcaaggtggagaatataccatccgggctgccgtctacaatcggctcgtccaccggacgctgcccctggttatctgcataggagccaggcggaatgtctttgacattaacggcgatccgctccggtgtgatggccgttctgccctttgccaatccacaggcgatgacaacatccggccgataggcttccatctctgcgatgagcaggtctgcacattcattgaagtgcacgggcaatagtactgcttttagctcagcaccctccatcacttcgttagcaagagcttccattaacgctcccgttggattcaccgcatccccgccaaaaggttcaaacccggatatcagaatcttcaccatcacacgccaactcctgtctgtttactccgatttgtaacgcaatccccactggccccgaatggtgtccatcaacttcatgatttccagggattcgtccagtttaatggtattgctctccgtgcggccttctaagatacaacgtcccgcttcttctgcctcaaaagcataaccaatgcacgttcgatcatccgtgaacttctcgggctcgtcctgaccattcacatgcagataggcttctttgcccgccaagaataaaggcagacgaatcttgccttccgtaccgtatatgaccgcttcattgctgaggttcagacgaatagcagcacttagtgatgcagaacgcccctcggaataggacaacaacacggaaaactgttcgtccacgcccgtctcaccaatattggccgtactccatacatgctggggttgttcgccaaagatcatcgatgcgaatgagatcgggtacacccctgcatccagcaaagcgcccccacccagatccgggttaagcaaacgtccttgcggctcccagacgatacggaatccaaagtctgcctggaccaaacgaacttcaccgatccgtccttctgcaatccatgctctggcttgttcaatgggtggcaagaagcgtgtccacatgccctccatcaggaaaagcttgcgctcccgcgcagtctccaccagctgctccaactgacgcgcattcatggtgaacggcttttcacagagaaccgctttgcctgcctcaagacaagccattacattctccttatgtaaaggatggggtgttgccacatagataatatctacctcagggtcttgcagcatttcatcatacgagccgtaagcgcgtgcaaaaccatattcagctgcaaacttctccgcgcttcccgctgtgcgtgaacctaccgctgctttctccgcgttccccgcatgccccaaatcctttgcaaactgggatgcaatccatcccgtgcccataattccccagcgtactttatcccgtcccactacttctgtcatattaaagcctccctactgcaaattgagttgaaaaggttcatgattcagatcaggccaacatgttatcccctttattttaccaaaaagaaacgcttacgtcagaaaacgatttcgagtatgtgctctcatctggcttcacccagcttattagcgactcgaacgtatctgtacacatttcaattctccagtagatttgctaagattatcagcagactagggccaagaggtcttgtcccttagcatacttgtaactagcgacaatctggttaaactatcgatcacatctgataacgggatcatataccctgtgctattcataaaacatctggctatactgcaaacgtgcttttgacaaggcagccagtattcactacatcatgccaaacgtatcaatagacgtttaagatagaccttcatgtccgagaaaatatggtacgttccagattcaattatcacctaaactgttccaaagagaggaggtcgcatagcaacatgactaccatccccggtaccgcccacagcggcatgaatccatacacgttacatcagcagacgagtcccaattcagaaaaggaatcctcaatccgagcagacctggatacattcttgaatgataccctgatcgaacttcgtcaggcagaacatattataacccgtgagaaatggcgctggtccacaactgagttagctcatcataccttcatatacatgcacaaattcacaggccaactgatcatgaatggaatcaaatctcacgtggttcgcaaatcagcttgtctgtccctaccaggaactgcaattgaactgtttagtgatgaagaccatgatattgaactgtatatcattcactttgatatgtatcgggctacggagaaaacaaaagccagacgaatctacgaacgtgagctcagttcacctgttacaggctggattcagggcccattttacggtatacagcgcattgccgcacagcttacacaattaagcaatgaaggtttggaaaggggcttgaaagcacagctcttcctgacggaactgttacatatgctctggcctcaagaagaccagactgacgtgggggctgggcaggatgaacccgaacagtggctcaggtccaccctgcaatacatgcgtgaaaactatatgcacgagatcaagctggagaagctggctgaactggctgacatgcacccgtcctattactcgcagctattcaagagccgcatgcagaaaaatccgattgagtacatcactcatctgcgtatgaaccgggccaaggaattgctgctcacttccgatctgcgtatccgtgatgtggctcgtgaagtgggttaccgggacgaattttatttcagccgacgtttccgaaaccatgccggttatgcgccaacttcctattcgaagcaggtccaccgaaatatcgtgtcgctctcctatccatacacggaccacctgatgacacttggcatcacgccatgcgcagctcagatccaaggccatcttcctcatatgcccaaatcgctgacgctgcccttccacgcctatgaaccttgggaacagggacgtcaggcttttcttgatgtgaatcctgaattgattctgaccaaggacaatgcagttgccaaagcgatggagcatattggcgatgtcgcgcccatcatcacgattccctggaaccagacagacgtcttcggtcatctgcatcagattgcatccattgtggatcgtacccaagcagccacagattggctggatcgacatgaacgcaaggcagagcgtgcacgcaaaaaaatcaaggaattcgtcggggacatcaccgttgccgttggcacgttaacacctaaaggtccacggatgtacagccatcggaactttggacatgtcttttatcgaaccttgcaattggccgctcctcagcgcattcagaccgaactggctggcaaatctcccggcgttggattcaactggctgcccttcacaccaggagaatgggacggacttgagacagatgtgctggtactggcgattaattctatgcatgaaaaggcaacactgttgaaagagatggcttcgaatccactgtggaacagccatcctgcggtaaaaaacggacgtgtacatctcatcgactggaactcgtgggtcgtatatgctccatattccatcaacatccagctcgatgaagcgctctctatgttgacgaacaaaccttcacttttgtaatctaaaaaatgtccatctccagaatcttaatttatgccatgtacgggcctgaattaagattctataatgatcactaattgataatgataatcaataacaatgaaatacgttgttggtaccaaaggagtgacccgcattcaacatccgggactgccacatcgtccgtctaattcaagaaaatctgcagtaaccgttgggctgacgtttttgtctgccatagccatactgctgctaagtatgtttgtcgcaatctctttaggtgccaaaggactaactctggaaaccgtatgggctgccatatttcagtacaacccagctttgacaccacatcagattattcatgagctgcggctacctcgtgtccttgccgcggttattatcggcgctgcttttgccgttgcaggagctttaatgcaaggcattacgcgtaatccgctggcagacacgggcattctaggcatcaatgctggagccacttttgtcgtagcactgagctttgccttttggcccggactgccatacggctggattatgtttttatcattcgtgggggctgttctgggcacactgcttatcttcctgcttggaatggcagcacctggtggtctgaattccatcagactgaccgttgccggagcggttattgcagccatgttaacctcgctcagcacaggtgttgccatttattttgacctgagtcaggatctggccttctggtatgcgggaggttttggcggaatagaatggcggcatctgaagttaatccttcccgtgctgctcgtgacgctggtactgatcatgccactcgcccggcgtgtatcccttatgtcactcggtgaagaagtagcgattaatctcgggattaacttgcgctggacgaggtttctcgccctcgcagcggttgttgtgctggctggtgtgtccgtgtcggcagtaggctcgattggatttgtcggacttgtcatccctcatatctcacgcaaactggtgggtgtggattatcgactcatcattccgatgtcttctctgcttggagcgatattactggtgctcgctgatctgggctcacgcatcgtgaacccgcctgaggagctcgcggtaggcattatggtcgcttttgtcggtgtacctttcttcctctatctggcccgtaaagaaaggagggccttgtagcgatgaattttaatacaccttcacgaggtaaacgttcgatagttgtcagtatcacgttgctctgcatcgccattgccgttattgtgatcagcctgaacacaggaaccattcgtctctccccagcggctgtgttacagactttgtttggtaatggcagttcagatgatcagattgtactgtttgattaccgactgcctcgcatcctggtaactgtactggccggagcaggacttggtattgccggagcagccttgcaagggatcacccgcaatccattggcggacccgggcattctgggattacatgcaggggctgcatttggactaatggtgtttgttagtctctcctttacgatggatggctctgtggccttgctgatcccgttgtttgcttttgcaggcagtgtggccgctgccctgatcatcatgctgttatcttatgatcgccataacggcgtatcacccattaagctgattctggtgggaatcgcggtagcggccgggttccatgccttgacactctacctatccctgcgtctggatgaagacacctattcctttgccgctcgctggttggcaggaagcgtctggggccgggattggattcatgtgcaagcgttgcttccttgggtggtgttatgtatctcgtacatctggagtcgatccaaaacgctcgatgccttcaatcttggagatgctgccgcaaccagtatcggaacgcctgtccgatcccagcgtattattttgctgctctgtgccgtggctttgtctgccgttagtgtatcaatggctggtggaatcggctttatcggtctggcggcaccacatctggcgcgtaggcttgtcggtccgatgcatcggcatctgattccagccgccgggcttatcggtatggttattctggtgagcgccgatacaatcgggcgaacgatctttcagcctaatgccattccggcaggcgtggtggttgccgcgattggtgcaccttactttttgtacctgttagtacgaagcaagtaatctttttttcaaaaaaaaaacaataaagacatccaagagatgttcaaggagaatgtgactacccatgttaaagaaaaatcttatgcttgtcatgagtatctgtctggtgcttgtgcttgcagcctgtggaacgaccaataattcatcatctgcttctggtggttcttctacggatacttcaaccaagaatcaagacaacagtgcaaattcgggagagcaacgtattgcctccatgtcgatccatctgaccaatgatctgctgtctcttggcattactccggttggttccgttatcggtggcgaagccaaaggtttcctgtcccatgttgctgatcaacttcaaaatacaacgccacttggtccggttaaagacccggatatggaagctttgcttgccctgaaacccgatgtgatctatctggacgaagaattctccggtggtgatattgccaaattcgaaaaaattgctccggtgcatgtcttcaatctggatgacggtacatggcgcgaccatctgaaagacattggcaaactcgtgaatcgcgagaaggaagccgagcaatacattcaggactacgcaaccgaaacggaagaagtgaagtccctcattaacgacaccattggtgatgggactgtgatggcgatccgtgttactgccaaagaattacgtgtgttcagtacacgccgtcccatgggtcccattttatatgaggatctcggtctgactcctgccaaagggatcacagatatcgattcgactaaaccgtatcaagtcgtctcccgtgaaatattgccagactatgatgcagatgcgatctttgtggttgtgaattcggatgatgaagcccagaccatgttcaaggagctgcaaaacaatccgatctggcaaggcctgaaagcagtcaaagccggccatgtctacccgattggtgcacaaccttggctcgattactcatcgatcggtaataaaatggccatggatgaagccaaagaaatgttctccaaaaaataatttcccttacactccacacttaacgtgtcacaatacaaaaaaacctctcttagagaccggaacagagttagttatcatactctcttccgctcaaagcagaggtttttgtttttttcttatctattttacttgtttactttccagccaatcgacctggaaataccttaaatccaaaattaacgacttgcattcacttgacgatatatcaaatcaaacttaagatttatttagtcgactaactaaatgtgcatgttcaaaaagtctggttttcagtaccgagaagatggaacgaaggtagaaatggagtagatgatatgaacccagtccaaaatgatcggttaatgggacagctatccgaactcgtgaaactgaaacgctacaaggttcatgagaaacttgtgaaccaccccgagttatacccggggcagccccctttgctgttccagcttgaacgggaagatggccaatcccagaaaaacctggccgaacaacttcagcgcagtcccgcaacggtaaccgtgatgctcaagcgcatggaatcatccggttatgtgagacgtgaagcagacccgaaagatatgcgcagtttgcgggtatacctgacggatcaagggcgctctgcgctacaagaattgagagaagtgattcaggagttggaacagcaagcccagaaagattttacaccggaagaatccgagatcatgtctgcacttgcacagcgtatgctccaaaacctgcgtgaatcctaaggtgatacagacttgcgattgaagcagctaaaggtattatgaaattgattcacttatgctatgaagattgaggtgattccctattgtggacgttaaaacgattcttgaccccgtataagtcggcggcaatcgtcgccccgctgctcatggtacttgaggttaccatggacctgctccagcccaagctgatgtccagcatcgtggatgatggtgtacttgcagggaatctgccccatatcataactacaggtctgatcatgctacttgttgcgttaatcggctggatcggcggcgcaggctgtacactctattcaagcaaagctgccgttggatacggcacagatctgcgccaggaactgtttgaccatattcaaaccttctccttccgcaatctggatacgtttcaggaaggatctctgatcactcgtctgaccagtgacattacccagatgcagacctttgtacagatgctgctacggatgtttatccgttcaccaatgctaatcatcggtagtatcatcatggcgtttacgatcagtgtaaagctagctttgattcttattgcaactgtaccggtgctgtttattattttatttattctgataaaagcttcctatccgctgttcgccagtgtgcagagcaagcttgatcaggtcaacgctgtgcttcaggagaatcttgccggcattcgtgtcgtcaaggcgtttgcacgtgcgcgtctggagaaaaagcggttcaaacaatccaatgaagattacacctcaactgccgtcaaagcctggcgtattgtcacactgaatgcacccgtactcagcctgatgctgaacgctaccattgtagcggtgctgtggtttggaggtttccaggtagtcggaggcgatattgctgccggagatctgattgcttttatcaactatgtcacggttgtactctcgtccctcacatcgatcggcatgatgatgatgagtttctcccgcgccaaggtatcagctgcacggatcaacgaggtgttacatacacagccggatattcaatcgggaaccgataactccgggaatgtacagtcatccccgtctactcgtgatcagtcccgaaaccaaacgtcttctcttccctcccacacaggcggtcaagtggagttcagagacgtatctttccgttatgacggagaccatgcactcactgacattaacctgaaggctcgcccgggtgagaaagtggccctgatcggttcaacaggttcaggcaaaacctcgctggtgcagctgattccccgtctatacgatgcttcgcagggtgaagtgctcgtgaatggagtgaacgttcgccactgggatcttcaggatcttcgcagccgtgtgtccattgtgctacaggaatccatcctgttcagcggcagcatccgggataacatttgtttcggccggcccggtgcaacggatgctgaattgcgtgctgcggcacaagctgcggcagcggatgattttattatgaaactgaaagatgggtatgacacggagctgggtcaacgcggggtcaatctgtccggtggacaaaaacagcggatatccattgcacgcgccctgctcatgcgaccggaagtactgattctggatgatagcaccagtgctgttgatctgcgtacggaagcgagcattcagaaggctttgcagtccttgatgaaagacagcacgacctttttgattgcacagcggatctcctccgtgaaggatgcagactgtatatatgttattgatgaaggacagatcgttgccagaggcacacatgatgaccttatggctcattcatcacactatcaagccatctattattcgcagcaacggaaggaggatgttcaatttggctaaacctgcatcttcctccatacaacaaacggtcgtgcctcccatcggaagacccggaccagcgggcagaggacctgttcccaaagtcagagcgaaaaatgctcgccacgccctgatccgggtatggtcgtacatgggacgtcatcgcaaaggagttatcgctgcattagtgctgacggctctcggaacactgcttaatctggcaggaccttaccttctcggccgtgccgttaacgaacatattgtgcccaaagtaacagcgggtttgctgaaggaatgtcttcttttgctgagtgtgtatgtccttggctcactcctgatgtgggcacaatcctatgtcatgattggtgtgtcccaactgaccgttaaggatctgcgacatgcattgttctcccgactacaagagctgcctgtccatttttttgataaaaatcaaagcggggatctcatgagccgggcgaccaatgatatcgataacgtatctacaacgctgaaccaaagcgtaacccaattgatgtccagtgccatcctgctcgttggttccttatcaatcatgtttgcactcgatgttcggctcaccctgctcagtctgataacggtacctttgattaccatcgccactcgcctgatcgcgtcaagaacacgcaaacacttcaccgcccagcagaaattacttggtgagcttaatgggtatgctcaggaaaccattgctggacaaaaagtcgtagcagcttataaccgccaggatcaggcacatcaacattttgaaaatttgaacgagaaactgcgcacatcaagcacacaggcccagaccgtttcgggtttggtcggacctacgatgaacgtgatgaacaatatcgggtttgccatactcgcttctgtaggtggatggatggcttatcatgaaatgacgtccatcggactgatcgtcagctttctcgcttactcccgtcagattgagcggccgctcaacgatcttgccaatcagtacaatctgattcaggctgcaattgcaggtgctgaacgtgtgttccacattatggatacgcctagcgaatacgtagaggaacagaagaaacaactggaccagattcaaggtaaagtggtatttgaagacgtctctttcggatacagtgcggagcgagacattttgaagaaggtcagttttactgcaaaacctggtgagatgattgcacttgttggacccaccggcgcaggcaaaacgaccattatcaacctgttaccccgtttctacgagattacaggcggacggattaccatcgatggatgtaacatctcggaactggagaaggatcaactccgtcggcaactcggcattgtacttcaggatgcctacctgttctcgggtaccattcgcgacaatctcgcctacggcaagcccgacgcaaccgatgaacagatcaggcaagcggctgagctggcgaatgcacattcgttcatccgcaaactgccacaaggttacgacacccccatcatttccgggggaagcaacctgagtcagggacaacgacaactgctgaccattgcccgggcaattctggctgatccggccattcttattctggatgaagcaacaagcagcattgatacgcgtacggagatgcacattcaggaagcgatgcgcactttaatgaaagaccgtaccagctttgtcatcgcccacagactgagcacgattcgtgaagccgatcagattctcgtcattgatgatggacagatcgctgaacggggcagccatgatgagttgatgcagcaacaaggattctactatcagttacatcagggacagctcaataagtctaactaaagcgactctgcaaagttactccatgccgaagcggaccttagcgcgtatggagcaagtaattacgctgtatcctgaatgtgggagaacatgtccttcgcgtgcgaacaagcgatcaatatgccacaaaagtggattttctctattccaaatgaaaagctccactccgtgccgggcgggcttgaggacatcgtccagctcgcggttggaacagagcaagagcgtaaactaacgaatctgaggcgccttattcaagcttttgaagctccctcagaaatctaaagaacctgagacacgttatatccaaataaacagccattttcagcgttttttcatgggatgttgggaaataacgtgtctgaagtttcttacaaattaaagtaaggacttgaaggccaaataagacgtcctatgttccttagaaaatcgactacccattcgccaggatcaaccggcttgaacttcagacttttatacgctgacctccatcatcatatcgtttacttgaatttgcagacacactcttatatagctaaaatgatctgaaccaatgtagtctccacacatcaacttattaatcgaaatattaaacgccgcacggggttcttctggacccatgcggcgtttttatgtttttgtctaatgactatttaattgctatctctgggtcagttatacgctttatgtctccattggcagatgaagcgtgaaggtggaaccaacccccatttcactatggacggtaattttaccattgtgatcctgaacaattttctggcagagtgcaagtcccagtcccgtaccttcttctttggttgtataaaatggattaaagatggtggatagcgaattttccggaatgccgcttcctgtatctgtaattgaaatgagcactgcgtctccgtcctgcaacaaatccatatggacctcaccagggtctgtcattgcttcaaaagcgttacgaatcagattgatcaatacctgcacaattttatctcgatccatgatgattacaactggctcattagtcatttcaagcgtaatttgatgccctcgggatgccgcatctgactcggtcaaagacatcactcgttcaaggcagtgacccaaatgttcaggcttcatgtgattcgcatgtggtttggaaaactgcaaaaattcagccgtcagatcggttactcttgtcacctcacccataatcacttcataccatggcgcgatattaaaggcttgtccacgggaaagctgcaggaatccccgaattgcggtaagcgggttccgaatttcgtgagccatacccgcggccagttcacctacagcccttagtctctcggaacgaaatacttcttcttcatttttcagccatttgctgcgctgttgttgaagtagcctatcctcggctaccgtcataaagtgctgcaacgaatccgacatttccgggtacagggagatgctgtagcttacctggagtccttgaagctgcacggatagtagtgacgacatgcgttcttccacatcctgtatctctggcaaaacgactgcaaatcggtctcctgcataccgggatatgccataggcctcggtgaaatgattgctgatcatctgacctgtacctgtgattaccgtacaccaaggatcttctgactcttttttaaagccgctaaagttattgacgttcaaaaggacaagcaaaaaagaccgttgctcttctactgtcttatgtaacacctccatgtaaccttcgtaattcaacagtccggtaagcggatcatgcagggtcaggaaccgatttttttcccgaagcctgcgcttctcgacctcactgttgattaaggtatgatacaaaaaaatgataacaaccgaggttaacaggtcaaataacgaaaccagcaaagcatatgtatctacaggcacatacgaaagccgaatcaacgtatattgcaacataagcagcaacgaaatcggcaaggtctgcgccaaccttggtttgtcctggatcattgaaataatgagcatataatacagcatgttgcaccagttcagttcactgaaatagtggaatatccctagaaaaatccactgaaattttcgcagcacaggatatcgtctctccccataaatacttgctaccaataatgtcgccgaaagtgacattattgccatattaggggtaagcctgagaacataagaggacagaatgacaagcagacaacctagcgggaatatcaccattttcatcgtgtaactaagcaaacagcctcgccccctttgacataaaactcacatcaaacaacttatgtacatgtattatatcgattatgattagctgatgttgtcgattagtggaggctcgccaaattcgcacgaatgtataaattatgaaggcaataggacatatgatgtaattgtaatcaacaaaagtgaaacaattcctcttcgcatagatcaatattgtggtacaatacattaatggattaatttaggataaatacttggtaatggaggatatcacatgacaacacaacgaaaaccactgggcctcggaacgctctctctactcgtactattgatgggtctcgcctttaatttccaatggggcacaacaaattttatgatcagtcattatctttttaacttaataaacatacctatttatagcaacggaactcaaggacttcacattccttttgtagtagcagccctcttctggattccagccttcttgatcgccaaaaaaaatcgttcacattatggcacaagtgtatcttataacgtcgccggatttatgttgctcttatgcatcattggaccagttatccccgttatcgattggatggtcaatggttaaacaattaaagccagctctctatatcccgagggctggcttctttgctgcttttccatataagatgaacaaattatttacacgataacgtagagtgcagaaccaatctgaagaagcgatagcgttcgcctaaagctttctaggagaaagctacatcggaagcatacgcttatcacctgattttcccctattaatatagggaatcaagaaaatcaggggataagggcgatcggaagatggtactgcactcggagtataacggtgtaacctttcacgttgatcttatttcttcgccatatacttacggatatcaaaagccaccgcagcaacaatgatcaatcctttgataatcaactgccagtatggacttacaccgataaacgttagaccatagttgatgaccccgaagatcagcacacccgccataaccccgggtaccgttccaataccgcctgccgttgatacgccgcctaccacacatgcggcaattgcatccagttcatacatgttaccgtaattgtttgttgctccacctgtgcgtgctgcctcaagcacaccacccaggccatacaacgcacccgcaatggcatacagcacaaccaggttgcgagccacatgaattccggatacatgcgccgcctgaatgttgccaccgatggcgtacatgtttttgcctagacgtgttttgttaaagatcacccagcagattaatgccaccgcaatagcaatgaggacaatatacgggatggaataacccccgcccagatcaatgtatccagagccaatgacagtgaagtccggtcgcaatcctccgatcggctgtgactgattgggttccgtatcaaaataaatggagttcagtccgtacacggcaaccatcgtacccaacgttgcgataaaaggaggcacatgtaatttggcgacaatgagtccatttaccaatcccacaaacagacctgcggtaatcccgacaaggatcggcagaaccacccataagtggggcagatcggggaagaagcgattggcatactcatcaatttgtagcatcgatgccgatacaaccgctgtcagaccaaccacccgtccagcggacagatcgaccccgcccgtgacaaggataaaggcggcgccgagcgcaataatggcccgtgtagaggattgctgcaagatgtcccgcagtgtggagaaggccagaaaattcggatcggcaatcgcaataccaataatgagcaggatcagtacaataaagatggcgcgttgtgttacatattgtttcacttgattgatcatctgtgtgttcatctgtttccctcctgactaagccatccgctgctgcgcggccagcctcataatatcctgctctgttgcctcggctccatccacgattccggtgagacgcccctcgctcatcaccataatgcgatccgacatacccagcagttcgggcatctctgagctaatcatgataatgcttttgccctgacgagccagttccgtaataatggtgtaaatctcaaacttggcccctacatcaattccacgtgtcggttcatccagcaacagaatctccgggtcggtcagcaaccagcgcgctagcagaactttctgttgattgccgccagacaggttgcgaatcagcgtgttaactgaaggcgttttggttctaaacttctgcgtctgctcacgtgcctcttcgcggccctttttctcgtccagcaagcccacacgatttcggtagcgccccagactggcaatgatcgtgttctcatacaccgacaacaccgggaagattcctgtgactcttcgttcttccgtgagcaacgcaatgttatgacgcttcgctgctgcgggggaattaatcttcaccttgcgcccatgaatcgaaatcgtacctgaagcgagtccgcgcagtccgaacaaggactcaatcagttctgtccgctgtgctccaaccaggccgccaatgccaagcacttcaccttttcgcagctcaaaggatacatcactaaatgatttagactggcttgatgtcagaccctcggcttttaatatcacttcaccgggtacgttcgtccgttccgggaaacgttcgtccagatcacggccaaccatacgcgtaatgatcagatctgtcgttagatccgcagcatcccatgtcccgacaacgaaaccatcacgcatgattgtcacttcatccgagatcgtcaggatctcctccatcttgtgtgaaatatagataatagatacaccgcgactgcgcagttcattaataatggtaaagagctgatccacttccttgcctgtcagggaagaagttggctcatccatgacgatgactttggattgaaaagagacggccttggcgatttccatggattgaatcttggagacagacagtgttcccgcctgagccttcggatcaatatccaggttcaagtccttgaacagggccagcgtatcggtatacatccgtttctcgtccaccagtattcccctcatcggaaaacgacccagccatatattctccatcaccggacgatgcgggaccggattcagctcctgatgaatcatggatatgccttgctgaagtgccgctttggaattcggaatatccacatcctttccttcgatacgtatcgttccttcatccgggtgatacatgccgaacagacatttcataagtgtggatttccccgctccattctctcccatcaaggcgtgaaccgtccccggtttcactttcaatgtgacctgacttagtgcctgcacacccggaaatgctttggaaactccattcatctccagcaggtaaggtgactccatcttggttcctcctttccatatgaccggcaaaaaagggacgctacccgaatgtcggacgtccctgtctcgtgctgttattgggcgtcggcgatgttgtcttttgtaatcttcttgtatgcaatccagacgtatttaccatctgtaatgtcgtatttggtattttcctttgttggtgtctcacctttggcaagtacggaagccagtgccaccgtggctgcaccctgattcttggcatcattaagcaccgtgcccagcattgtaccatcctggagagcctgaatggctggagctgttgcatccacacctacaaccggcatggatttgccgtccttgaagtatccggctgctttcaatgcctcaatggctcccaaggccatgtcatcattgtttgcgagaacggcttcaatcttgtcaccatgggaagccaggaacgcctgcattttctcctgacctttcacccggtcccacatcgccgtgtcttccgccagtgcttccacttcgataccggcatcctggatcgcctgaaccgaatatttggtccgaagctctgcatcctggtgacccggttcccctttcagcatgacgtattgcagtttgccatcgccgtttttgtccgcttccggatgttctttccagtaatccacaatcagctgaccggagatcgtaccggactcctccgcttttgctcctacgtagtacactttatcccatttgttcatatcttcagctactggctcacggttgaggaataccactggaatgttcgctgccttagccttgtcaatgatgacacctgccgccgtccggtccaccgggttcacggccattgcattgtatttcttggacacaaacagatcgactttctcattctgggtcggctgtgcattctggctatccacgatatccaaagtcgcgacaccttccgctgctgcggtcatggcattacgtacacccgtcatgaatgtatcgtcaaatttgtagatggcaacaccaatcttgggcgtttccgtaccggctgctgtctggcctcctgtatctgttcccgtacttccacctgcactgtctccgccgctgctacaccccgccgccacaaccatacatgccgtaatcaacagtgtcatccatgttttcttcatatcctaatgacctcccccaagttcattcggcttcaccgatgtctttattatgaaagggtttacattaaattcgaatacaatatcttcacctgttctatcgaaatcttcctcaagttaacaaacaccttaatttcttcgttcagcattcgttcaggcattggttcattgtacaaaaggaaacaacagcttctggttatccatccagaacatattgtctgtactaaccagcttggtctcaagtaacactctcgcttgcacctgttgattgttcagccgcgcaacggcttgattcaatcccagataacctgcactgtatccattctggacgatgagatgatcaaagaccccttcttgcaattgctccagttgttgttgttcactgccgaatccaacaatccttaccttggccgccgatttgcgtcgattcagttcatcggctgctcccagggaagccggttcctgaagagtaatgaaaccatctacctcctgctggtccagcaattgcttcgcagtctgccaacatccatcccgtgtattacatatcgatttgggttccacttgaatattaggatactgtaccaaggcttccataactccctgctctctctgaatcagacccgaattaagaggatcggggcccaataaagccacatgccctttcccttccagaagctccgccatagcctggccggcctgtcttcccgcctcaacattatccatcgagatgaaactggtgatgcctttcacgggaaattcatcgttaagcacaatgacaggaacaatggttccatcggaatttgttgtctgtgcctcctgaatgatgtcactaagtgccttttcacttaggggatcaaccaatagagctgatgccccctgcttcagagccgatgcggcggcctccacttgagcctgctctcgcccactgcgagacaacgtatggctgttgatatttgcctgtttgatctgcatctgacttccagcagagtccagaatggcaggcgtgtacacatcaccatcggaagggtatgcttccacggtaatcagttcggccccgttctctttggcagccgcttcggcgccaagccggatagcttccgcaagttcccctgtcccagctggcgtaatgagcgcaatacgtggcggtactgccgtagtatcgggactcgataagccacaggcgctgcatatgagcagacagcagcttgcaactgtcagggttactaaccgacgtttccggattccagggaagctcgcagcaacctttttccaaaacgtacgaatgtatgaccctacaactctatggctgtggatatcgctcctattctccttattgtctgtcattaggctcgccctccttctgctgcgattgaatgggaatccgaacccagaccgtggtgccttcttccaactcacttgcaaattcaaggccatatgcctccccataatagagccggattcggtcatggacgttgcgtacagctacgccggagcctgcaccacttttgaccacaggacgaccacttaataatcccgacatctgttcttccgtcatgccgaccccattatctgtaatgcgaaacaccagtttgttgtcctcacgataaacatcaacctcaatacttccttcgtccatgtggtactcgatgccatgaacaatggcgttctcaatcaggggctggagcaccagcttcaatgtcaggcaatccagaaacgtatcatcggccttaatcgtaaagttaaatttgcgtttaaacctcatctgttgaatcgtcaaataatgctgcgcatgctccagctcttccctgatcgtgataatcgttttaccttgactaagactgatgcggaacaggcgtgaaagagacgtaatcatcgtaatcacttcctcattgcggctcatgcctaccatgcgcactactgaattcagcgtattatatagaaaatgtggattgatctgggcctgcaaggcttccagctccagacgacgcttttgttcctgttcatggatgatctcatccatcagggtgcgaattttattgaccatcaggttaaagcgacgggatagtcgttccacctccagcggcccttcaatcggcaactccacgttgaaatccccgcgctccacggccttcatcttacgttccattcgccggatcggacgagtcagactggaggaaagaaacagggatacgagaatgaccagcaccagtacaacgaccaatacacgaatgagatatccgttcacttcctgacgcgttgtcataatctcatccagataagcaacaccgacgattttccacccgatattggcaacggacttcacggtattcagccttttctgcccatctgcttcatcttcgtaactgccggaagccaccaaagcctgttcgatattctcgcttttgagtcccatatacatcaattgttgctgcggatggtacacgatattgcccgcactctcatcgatgatatagacatatccccgttgccccagactgacccgacggctcagttcatccatctgtttgaaattgatatcgaccagcaaaataacctgccgatcctgaccattttgccgtatcgttatgcctttgctcatggaaacgacccatttatatgggcctgtgtacatgttctgaatatgaggtaacgagaaactcaggtgatccggcacacgaagcgcagactgaaaccacccttgctgtgtcacatgggcgctggtttttaattcggctgtaggtcggttcttgagcaatttccccgtggaatcaagcaaagtaatcgagatgatatcttcacgactgctgagcagtgtgtcaagctgtttgtccaccagttccccttcccatgtcccgtcacgcaacatgtgttcctcaatggcacggtacagatgcgacatactgcggacgtaatcctccaggttataactgacctgatccacaatttgtctcgtcgtgagttccgcacttcgctcggcagcctgcgtgaacttgtcatgcagaagcatcgccatgatggttagcaccaagacgatgaagacggaaaaggaccatgtaataataaaccggatactgctgactctggacgaacgcagacgagagcgtaattgaactcccatggatttcacccatctggacaagaacttcatcggattgaaccttcacttgccgcctgggaagcctgtttacgatattctttgggcgagacaccaatatgttttttgaaacaaaaactgaagtaatttggttcggcaaagccaacctgctccgcaatttcaaacgacttcagctcggtcgagcgaagcagttcacgcgctgcctccattcggatctgcatcaggtactgcaggaaggtaagttgtacttcttttttgaaaatgccacaaaaataaccggagctgatatgcaaatgcccgcacaccttctgaatggacaggtccgggtcggcataatgctctttcgtgaagactaacgcctgctcgacaatatctttgtatacatgctggcgtccgctggcaatgcgatgttgcacgagtagacagacctcccgtacctttttctgtgcctcagtaagtccaggcagtcggaacaaatccgcatacaactggaaccctgcaccaaagatgtcttccatttcttctcctgatgcctgtgctgccttccatactgttgttaatacttcaattaaatagagctgaatatcacttcgcccgtgttccacggtaatttcccggaaaatgatcgccagtgcttcctccagctctgcttgtgtacctgccttcaggcatcgtgtcaacgtctgctgcttcaactcgtcgaaccgcagcttgcccgccgtctgtcgctccacgtccgcaatgtatatgattgaatctgtcccgggcacaagccgataatccaatgccagcagggcatcttcataggcatgattcacatccgcgagtgtatccacaatctgaccagagcccaccgtagccgggatacgtaaatagtggttgatgctgcgcatcacattttccaatgccttctgttgcctcttcactccatctgtaccgcccgtgcgatccacatagagcaggacaatcgtctcctgatgcataaaggcatgaccagccccatgctccgcccaaacttctgccgcaatgttaagtgcagcaaagcgtttcagctcagcatcctcagattgacgcaaggaacctccgggaacgaatatctcagactggtccgctacctcggatattgttttgttatgtcgctgtgggggctcgctgaatactccctcagacttctccttttgcacatctccatccatatgcagtgtcaatacggacaccccataacgttctcctgtcagatccaatccacattgtttggctttactatgaatatatgtcgaggatttctgccgatggagcaaggtcgccatcagatctgcctgtaataaaggcaaactggtatgatagtgctcacgcagctgctgtacatctttacgctcagccacttcagccgccatctgggcgcgcagtcttgtgagcagttctgtgagatgtcctgccgagaacggcttcagcagatattcgtccacacttaacgagatggcttgcctcgcataatcaaattcatcatatccagtcaaaatgaccacctttacgagtggattacgtttcctcaatctttgtgcgagttccagaccattcatgaatggcatgctgatatccgtcaccacaatgtccggctctaccctctccgccatctccaatgcttcccgcccattctcagccaaaccgactatccgcagatcgagcgcttcccaatcgacctctacaacaagtccttcacgcacatcttcttcatcatccaccagcagtacccggtacacgtttggattcctcccttttgatgccggccttatgccctatcaacgaatatatatgtagcattgtgaatcatttgatttcttattgctcaccgaattgaagcaaaatgcaaaggctcatgttgatctgttccaaggttgccatcataatatacaatattatcagggatatgtaatcgctttctttgttagaggtaaggcaaccctgtcgggcagtgcctaagtgaaatgtgaaggatcgtatatgaatgctaaaggtaggttaaagtaatataaacacggaaaatttcgaagtacttctaataagaggtgttttcattctgactataattcagacttcattcttgttctttacgatgattcgtacttaatgctttaaaataaatcattgttgtatctgggttggtgtgtcccattatctcggccaaacggtgcagtggcgtatgctcagccatggcgtagccaaaacgatgacgcaggtcgtgtgaactcagtccttccagccctgctgttatcattacttttttaatcaggtgacgcaatgctctctccgttaaacgatcatttgtcttctctgaaggaaaaagatacgcacgatcggtagcaagatcagataagtactgattcaacatgacaacacactgcatattcatagggatcttacgttgcacgttgcgtttatcggctctcactgtcaagtgaccgcttcgtctaccaagttcgatatcatgaggcttgaggttgcatacctccatcgttcgcaagcctgtgtgaaacataagggtcaggatggtctgatcacgaagtgaattaccatactccactgctgctaggaatgcctgctcttcttcaaatgtcattcgacgtggacttactttgtcttccggaatgaattttaatggtttggaagggtcatgactcagcctggattccaagacagcccatttgaaaaaacgcttcagcgtaatcaatctccggttaatggtggctggtttcaataacataacttggtgagcatcttcacgataactgactaaagtggatgtatccacatcttcaattcgcagtgaaaactctgcgctgagcatggtgctttccttgtaccattcgataaagtgcttcagatcacttgcatattccttcacggttttgggatgcaattccccctcttcagcaagcatatgtatgaattcctctactgtcggttcccgctgcaccgaaacccctgatgactgattcattagaaaatacctccaaatcttgacttatattagcggacatggtattatcatattaatcgatacattagcggacatcaagttcgtggtttaaatgcaccaggtgagtgtcaattttaaattatactcgtcataatgatcggctaaaaacttattttttggaggaatcacatgcaaacaggtacagtgaaatggttcaacgcggataaaggattcggctttatcgaaactgaagaaggaacagatgtattcgttcatttcagtgcaattcaaggtgaaggttacaaatctttggacgaaggtcaacgcgttcaatttgaagtaactcaaggtaaccgtggaccacaagctgagaacgttactaaactttaattatatgaaagctgccttattaataaggcagctttttatttacacatatgtgtcacagcaaagtttccacatcccaagaatgaaagcgaggtattccacatggataaagaacaattgatcacagaagtagccaaggctggcggtttctccaagaagaatgctgaaaaagctgtaaccgttgtattggattcgattctcgaagctctcaaagaaggcaaagaagttcaactggtcggattcgggaaatttgaagtgcagaagcgtgaggcaagaacgggaagaagccggaaaacaggcaaagaaattcaactacctgcaggtaaagttcctgtattcacagcaggcttaagcatgaaagaagctttaaattaaacaacgcaacaacttattgaaaagaggtttttattcaaacacacaatgataatatggatttaaatgtcgtgtttactaccgttgatgatatcattaacttttattcaggcaaacagacaaactcggatcatacagaaaatcacactcatttgaagcccccatcaacaaagtctgattgtaccctacgaccacccacccgttaaattaacatttcatcttggacaacaagaggccctgatccgctcaaaacggtccagggcctgatttgcttggaagccggctctgtcaggaaccagctttttttgtcttttaagcacaatgcacatccatcctatttgctgttcagaagttcgcgcaagatctgtagatcatatgtagagacaagacgttccaaatgcgtatccagccattcctcatcctgatcccaccacttcaattccagcagcagtgcaatcgtctcttcgtcaaaacgctttttaacagtcttggctggattaccaccaacaatcgtatagggttcaatgtccttaacaacggttgaattggaggcaacgattgccccgtctccaatcgtgataccaggcatgatcgttacattttgtccaagccatacatcgttccccagtaccgtgtcacccttatatggaagttgttccagtgtaggtgtcacacgctcccatcctccaccaaaaatgttgaacggatacgtggtcatcccctccatccgatgattcgcgccattcataatgaatgtcacaccttccgcaattgcacagaaattgccaatgaccaggcgatcaccaataaagtcataatgatgctgtatccggtcatagaattgctctggcggatttgtgttatcactataatacgtataatcaccgatgtccacgttggaacgcggcggcaggttttgaatgtaacataccgtacggatattctcattcgggaaaagttttgttttatcaggggccatattgtagtccctccttttccctattgtaacagatattaaatcttaaacggactaagtgaggtctgcagctctgtcgacacatcagacaaaatagccgcagatgccttgatctgctctaccgacttgagctgttcatggacagaatcggcagcctgttgtgaattggtactagccgtttgcgcatggcgagcgatctcatgcacagaagctacaatctgctccacgcctgcggacatctcttcacttgtcgcagccatgtcctcaatctctgtagcaatacgcaggtttgtatcccggatcaggctgaagttttgctccgtttcccgggtcaagcgcagtccttcctgtacttcgtccttcactctcgacatggccgatagcgattgctgcatatcttgttccatggcttcgaccagttcttcaatacgatctgaagagtctccggcttgttcagccagtttacgaacctcggtagatacgacggcaaatcctctgccatgctcccctgctcttgctgcttcaatggatgcattgagggcaagcagattcgtttgatttgcaatctcatgaatggcggaaaccatctggctaatctgtgccgacttcccttccagcatacgaatgacttcatccgttgtggtaacggaagattcaatggtagacatctgctgaacagtaagttgcaccccttcacctccggtttcagcctgtttgcgtgaatacaaagcagagtccgagatgctggaggccttgtccgccatgcgttgtacggctatcgccacttcttccatggcctgcagattttcttctgtactgatcgtctggctctcggctccttgtgcaacttgttcaacggaggatgcaatctgcgccgattctttggacgtttggtccgcaatcttcagtagcagcccagtcgaatgctctgctttctccgcagcttgaagtcctccttgaatgatgacctggagattacttctcatctcattgtatcccatgcccagcatgccaatctcatcttggacgttgtccacaactggctgtgtgaaatcgcccgtacccgcacgtttaatcgctacggatacccgttcgattcttactctcaccctgcgaacgtacagcaggatcagggtaattgcgactaacattgcaagcaggaatacgatcaggaatgtcttgaggaacgaggagataatcacatcaattaacgattgagaagcgccaacatagaaaattccgataatctctccggatgcgttcttgattggttcataggccgtctgatatttctgacccacaaccacggcttcaccgaagtatttttccccttgctgcaaaacggtctgggcgacctcgtccgataccttcgtaccgacagcacgctttccgtccaccatgacatttgttgcaacacgttcgtcacctcggaagatcgtcaccgtgtccccagacgcttgtccaatctcatccaccagttcgaaattgccttccagcgcggtatctcccttgaataattgtccgttcttaatggcccaatctcctggatgcttatatgtaatgatactattcgccatctccaaatcgctctttgccttctctgtagcaaatgtcgtgatcccctgcttcatctccatgattacacttaccgccacggctgaagagaagacgataaatatactgataacgatcaaactgattttggtaccgatgctcatgcttcgcatgtgtgtgagccacccttttccctatgtaattgtggggatattcaagccaatttcgattccgtttcgaatatcactatagtcttatcggtaggagtgatcacaatatttataatatttcagtgacttttatcacagtaataacttgttgaaacctaatattttacgaattatccgtaatcatgtaagaatgttctttgagtgaagcgaatcaagcgcatgccaaaagtgaggccagacatggacgaggccggattttgctggatgttcgctccgtctaacctcaaaaagcagaacaaaaagggattcgatctgaccatcgaatccctttttttattttccatacaacaacgttgatctgcaggagataattcttatttggatgtaaggcttacttgtgcagcggtttgatcccagtccacggtaagtcccagtccttctgagatgaagcgtacaggcacaagtgtgcgactgttttgaatgatcgctggtgcatcaatttcaagtgtctctccatttacggttgcggtgctgctcccgatcttgagcacaagggtctggtcattcagaacagctgttaccgacttcgccgttttgtcccaagtcacttctgcacctagtgcttcgagaattgcgttcacaggtaccatcactcggccactttgctgcagcgggtcctgatccgggaatgtgatcaatttaccatcgagagttacggtaatggttttgtcggttgttccggatgaggtgttcgaacctgtctcttccgaagtctcaggcaaaggcgttacttcacgtccaagttgctcttgcagattcgcaagacggttcagtgcaaatgtcgtcagtgacccggctgccatggagcccatgcctccgcccccaccgccaaagttaccactagggcgtgtctgggtattatctgtacccgttgttgcatctgttgtaccgtttccagttgcagtaccctgctgagttggaggtgttgtaccatctggaggtgtcattccttcgaaaccttcaggcggcgtcattccttccatgccttcgggtggtgccatgccttcaaatccttctggtggcgtaccgcccataccacctgctacgtctgcgtttgcagaataagcgatgttggattcaaactgttctgtcgtataaaacttcgttgggtctgcttccacataaggacgaatctcatcggcaaggtcagtaatacgatcctgaatgccttccatataatccgtcagttcattgacgtaactcaaatatttttccttatactccgccacagcaagcaggttattaatcatcggtacattttccatgttaatgcctagtaccggctcgtccacagatacgtttgtcgcgttggtgttggtcgtggttgatccggttgttgtgccacgtccagatctacccgagtacccgttgaaggacatgttaaagtcccaaggaacaacggtgaacttgccagcggcatcactgtagagcatgtagttgtgtcctttgtcgccgttataactgtcatagttgccaaaaaccatgttgcctgcaatatattgaagcgctgaatccacgtccagtgcactttcaatatcacctttttcaccttctggcatctcgttcagcgtttggatgaaggttttgagtttgactttgtccttatccgtacccaagtccttggtgattgtactgtagtcactgccctcttcatattgaagataactcttctcatccgtatcatagaggacgccttcttcgtaatcctcaccatagttgcgctccagatagctatcatccaccgcttcaacgccagtatagaaaccaataagctcgccgttaacgtacagattaacatagttcgtcattggtacatccatgccaatgctgcgcagtgcttcatagtgaagaacttcacgcatatacgacggatcggcatagttattgttcagcaccattttgtccagtccgagtagggtttgtgttttgtcgtatttatcaaacttcagtctgaagctgtaacggtccgaatcttccattgaggctacagctttcagggtcagattgcccttggtggagaaaccgacattgtccagcttgttgccgtccacttccacactaacattcttataatccttatccagcggactttcgagcatgctcttccagtctgcatcatcaatcgttacattcacatcaatgacgttatccgtctggaacaacgattcataagcttgcgtcacgcccgcactcgagattgtcgctgtgctctctgcggcaaatgccgcattcggacttgcaatcagaccaaaagatgtcgttaccatcgtcacggacaatgccgttactgcaacttttcgtaataaaatattcaaatgatgaatcctccttcttggtttctgttaagcaaccgaggcttatgtaaccatggtaggggacgaacctttagtgaatcttaaacgcgaacaaaaatgatatgtatcactatgaaattttcatggatatacaagaaatataatgaaaaaaagcgcaattataaccttggaaccggttcataagtcctattttgttgcaaatatctaatattaatatgcctatataacgatatatctgaagagtagaacttacctggagttcatatacgtgaatagcaaaacccattacgaaaagcttttagaaacaaaagagaatttgatcagacaggatatttagggacgatttcacagtttttaagtcaacaattacatagcgtgtacaacacccaggataagtccttcgtcacaatcgtagaaggagtgaaccatcttgtttaataagcttcgctggagtaccatgcctttctttatcaaaaatttggtgatttcattcggcagcattatgttgatcggtgtaattctgattactgccgcgtatcaattgcaaaaaaatatcttggttgaacagttgcatgaccaggctaccgtcatcacccagaaatggtacgatgatctcgacactgccaaagtggcagaagcggctaaggaaaaaagctactccggtcctatacagctggaaatgaaaacttatctcgattccatccatgaattctatccaaacatcgcgcaagcgtacatttttggttcagaacttgagcaaggaaacggaacgtccatcatcgcgattccaacgaatctgttggaaccattcgaggaaggtaatctacccgcaggtgccatgtacccgctgcctcagaataacgtcgtagtgctggaacagatgaaaaaggacggaaaacctgccttcagtgatttctacacggatgagtacggaacctggaccactctgatctatccgattaataacgcagacggctccatgtatgctgctctttacttcgatgtagatgcaagtgccgttccaaaaggcctgaacaaactgcttacgtacggtttgatgttcctgatcggtttcctgatcctgttcatggtattgcaattcattttgctgaaaagaacgttgcttccgatccgcaatctgatgaaaggtatcgaagaagtcagcacgggtaatctggacgtaaccatcgataccgggcgagatgatctgggtatcatcaacgagaagtttaatgcgatgatccatcgattcaatacaaccatctataaagtacagaatacttcgcatcacctctcggaatcttccaaacaactactgggcatttccgagaaaaataatgtgaacattcaatccatcagcaccaatattcgagaaatatctactggactggtgtcacaagacaaagccactgtggagaacgcacgtgccatgaccgagatgtcaacggtagtgcagacgatcgccagcagctcagccgatgtggcagatgaagcactcagcatggagcagcgctccagcacaggtaatgtggtgatgcaacaagtcattgagcagatgcgcctgatctccggtgcggtgcaaaatacgtcaaactcgattcagtctttggaaaataactcgaaccagattagcaacattgttaacgtaattacggagattgccggacaaaccaacttgcttgcacttaacgcttcaatcgaagcagcccgcgcaggtgaagaaggaagaggttttgcggtggttgccggcgaggtacgtaacctggcagagcaatcgcaggaatcagcgaagcaaattcgacagttaattgaagaaattcaacgggatattatgcagtcttccgaagcgatgcagttgggttccaaggaagttaccaaaggcttggaagttacccaagagactggcgtattcttcgagaatattctgactgctacgaataaagttgcaaaccagattcaggatatctccagttctactgaagagatctcggcaagcacacaggaaatgtctgccacggcagatgaactctctgccaatgtcagcaaagcagcaagcagcagtaaacaaattgagcagtcaattgatgagcaggaagcctccatggcagccattgtgagtgcctccgatgaactctcggttgtatccgagcaactgcaagaactgatctcattctttaaagtacgcgcagaatagaagcaatacgaaacagataacaagaatacgacacagtaaaaaaaccaaggctcatgagtgattacactcaaagccttggttttttgttgttaccagggtaggtgggttaggttctagttctatacttcccggtatcatttaacagacagtatttcttctgctcttatcatcatctttttctcatcattgtagccggattgttcggatcgaaatccagcattaagaataagatcggcctcactattcgatatatattgaacctgctccggtgtaagggttatttcaactttttctgaataccagctatctttcgttaatttcgttaccaattcttcactggtactcgacctcggcgggagaagcgtcttgccatccatttgcagatcgatatcaaaaagctgtttcgaatggaaaatctcgtggttgacatcttgtcctatataccttattcccggttgaaaagtgaagtcgtgatcaccagattgttggacacttaatcggagttcataatcacccaattgtctggttgccgtcatcgtctgtccctctctttgaatccggtctgctgtatcgttgctttccaatgatgaatcggaacaaccgagtaggacaagacacatcatcaggatgtaggagaaatatttcaaggtagacctcctctcattctaatatataatttggctcttagattttggacgcagaattgtaccattaagttacattgttaataaaatataaaagaagttctccgcttaagagaaagcatatctaaacagcccatagtatagaggtccaatcgcgataactaaagttatcaacatccaaactctcctcgtcataattggtaatccatccaaaatctcttccccttcgttatcctttaaaagcattgcgaataatacatcccataacaacgctgccacagtaataaatttccacaaaaaaggatttaaaatagctgtttccgttacatatcctagcaaccctatccatgtaataacggatacgacaaaatcgattttgctaagtttcgacttatactttcctttaataagatacgagagtgatgctgtgccaagtaatccaagatagatcgtccataaaacgtgttccatacgtactcctcattctttgctttattttaatatttactgtttcttcgccaccctttgctattatagctattcaactctataactgatatatttagcacttttccatattatagtaactcctcatccgtacttcctctactcatttattgttttcatcccccagcccacattatgacaaagatcacatccaccttccccgttcaagtgctacagttgttaacgaccagatgaccgaaatagtaaattggtcattagataacttaccttacccattacctttcaacatataaggaggtgcatatgcgatgaaaacgatagatcgaaggcaacaggtgatggattctgccgagaaatcctttgccctgtttggctacaaggccacaacgatggagcaggttgcgagacttgccaatgtgggcaagggaacgatctatacttttttcgaaaataaagaagaactgtttagcgagattctgcgctcgatcattgcggatatgagacagattacagagcagactgtgaaggaagagaactcctttctggataacgtgcatatgagtatggattctttgctggagtatcgggaggaacatgagctgttgatcaaactctttcaggaggtcaacgagttcggtacgccacaggccaaggaaggtttgcagaaagtggagacagccattcttgaatatctggagcgtcaggtgagccgtgccatggaattagagcagattcgcagagacgatcccatgctggtttcttttgtcctgctgaagctgtatgtcaccttaacctcagattggaacaaagcgcatcctacgttgcacaaagatcagatcaaggattttgtgggcctctttctcaagaatggcttatcccccaccacatagagaaaggtgtatcacttgattcaaaacataatagagatagaacaaacggattagcgtaaggatagggagagaacatgatgaaatcattccacgtatttgggcaggatctgaagtccgccttcaagaaaccaaaagtatttattccgatcctcgttgtactgttcattccggtattgtatagtggcctgttcctgaacgcattctgggacccgtatggcaaaatgaacgagttacctgtggctgtggtcaacacggatcagggggcagtctacaacgacaaatccctcgaggtcggtcagaatctggtcgatgaattgaaaaaaagtgatgatttctactggcaattcgtgactcgtgaacaagcagaacaaggtatgcaagacaacacgtattatatgacgattgtgattccggaggacttttccaccaaagcaacaaccctgatggatgagcaccctaagccggcagacctgatctatgaacccaatgaaggatacaacttcctcgcaggtcagattggtggaactgcggtcaaacaaattcgttccaaagtcgctgccaaagtcacagaatcgtacactgaaacgctattggatcaggtcgaaaaaatctctggtggtttggcagatgccggggatggagcaggtcagattcatgatggtgcgatcacgctggatgagggtgctgctacattaaaagagaacctgtccaaactggcggcaggcaccgacaagctggaaacgggcgtagttccgttaaaagaaggtacgtctactctcgcccaaggcataggtgatcttcatactggcgcaagcgccctgtccagtgggctatcccaattggcagcagcaggcaagaagctgggtgatggagcaacccaggctgaagcgggtggaaaacagttacaggcaggaattcaatccgctcaagaaggtgcagccaagctggatgcaggactgacagcttccgaggaaggtagtgcaaagctgactgctgggctgcaaagttctgttgagggtagcggccaagttagcgagggcgccaaagcggttgcgcaaggtcttgcccaattagccgaagcgagtccagaactggccgcaagtccagctgtgcagcagctcctggcagtaagtcaggctgtagccactggcagcgaacaggtgtatcagggcgggcagcaattggtcgcaggcagtcaaaacttgtacgctgcacaacagcaactgcatcaaggcagcagtcagttagtgcagggtgaacaacaactggtacaaggtgccacgcagttatccgccggacaagaaaagcttgcgactggtttacaacagttcaattccaaattatccgaagcagccgctggaggagccaaacttgcggatggttcaggtcaattgaatgctggtgcaggcaagttggttgcgggtgtaagccagttcactgatggaatctcaacccttgcagatggctcacataagctggatgaaggtgctggtcagttaaaagaaggtacccttaagctaacagacggctctggcgaacttgccaccaagttgaatgaagcggctgagcagacgggtagtgtaaaaaagaccgatgaactcgtaaccatgtatgcagagcctgttcaggtcgatgagcataaatataacgaggtacccaactatggtacaggattctcgccatacttcctgtcacttgggctctttgtcggcgcattgattgccacactggttgtacccacacgcggcagcacggttagcgaagcaagtggctggaatcgttttatgagtaaaacgctggctttcacactcatgagtgcagtgcagtccctgcttgcttcatggctggtcttatacggcttgggtctggatgttcagagcgttccattgttcctcttgttcagctttgttaccagcctaagcttcatgtacatcattcaggcactggtgacttggctggagaatccgggtcgtttcctcgcgattctgatgctgatcttccaacttactaccagcgcgggcaccttcccgctcgaattaattccaaattggctgaaagtgtttaatccatggctgcctatgacctattcggtaacgggttataaagcagtcatctcaagtggacagttcggtgtagcctgggatcagattggtattctgtgcatattcgccgtgattgggcttggaggaaccttaacttatttcctgatgcctcataccacggagaacgcaaacgtcagcagtgaagtctcacttcacctgtaaaaagtaaaataaaaagcaaaggcatgtacctaagccccaccctcttctggacaacaagaggtgtgagttaaagtacgcctttgcttttttagtttgagataaaatctaagtttgctaacttcatatttctagtatgtagagtaaatttcagaacttgagatagcgaaactaaacaatagcacgagcaaaataagtaatacatacatcgctgtaccgatgattccacaaacaagtccagcaatggccaatcctctgccttgctccatgcgaactctgatctctttgaaggctaaagatgcaaatataatcgcgacgattccgattaaaattcccacgtaaggaatcgtgacggacagaatccccaaaactagtgatacaatcgacttgctattggtctttggtactacataaggcggtggtggcaatgtgtcgttataataacgatctacatcattttcgtgatgttccaaggtaaatcctccctgttctttaagtatgttcattataatcgattattaggaaaaataatatccatattgtgttaattatgaattaccattagatttattttattctcatcatccccggacatatacctacatccacaagcttataaattgtacttcaaggatatgaatttaagaaccgtttatccgtgtgatgatacaaatcaagaatacctctaacatatagatattattatagtcgtaatacttttctgaatatctttgggggatcactacgatgaaaatcgataaagtaatgaacatacttatgattgtgatgcttctacctattgctctttatcgaaataatgtagctgtactatgttttagtattgttttgtttggaatcatgagttacaccacttatcgaattcgaacacgttggaatgtagtaacttatatctttttgacccttgtactgattatctggaacatatacctttggacataagctattactttcaaaaaaaagaacgcactcccttattactcataggattgcgttctttccacatttcttagatttgaagtctcttctatccttccacttccacccgctgtaaaaacgtccgggtacgtgcgagcttcggattgccgaagatctgttctggtggacctgcttctgcgatttccccgttatccatgaagaatacgcgatccgcaacatcacgggcgaagcccatctcatgcgtgacaatcatcatggtcatattttcctgtgcaagttgtttgatgacacgcagcacttccccggtcagctccggatcaagtgccgatgtcggctcatcgaacagcagaatgtccggctgcatcatgagtgcacgagcgatggctacacgctgtttctgtccaccggatagattggccggataggcatcggccttgtccgatagccctacttttccaagtaattcaagactgcgatgcctgatgacgcttgaactttcttttttcaaagtcttcggtgcgagttccagattagcctgtacggtcagatgcgggaacaagttaaaatgctgaaacaccatgcccatgcgatccgtcatcttgcgaatatctgcggcacccgcgtaacggccattatcgaccaacgtctgatcctgaatgcgaatcgttccgcccgaaatatcctccagatgaatcaggctgcgcagcatcgtacttttccctgaacccgaaggcccgatcacggcaatcacttcgcctggttccacgttgaaagatacctgcttcagcacatcaagtgtgccgaatgattttctcaactgatttacttctattatatgtgtcatatgcagacagtcctttgattgatcagatttaatttattcaaatgaaaactgcttctcaagtgccttgaacagcacggtgagtactagtgtcatgagcagatacataaccgccgccacgaagaaaggtaacagctgtatgtcgcgatttaccgccgcttgggcgtaatacaacagctcaggtacagccacggcatagagcagtgccgtatccttgatgagcgtaatggactcattggccgttgcgggcaatactacacgaatcatctgaggaataatgactttggtcatcgtctgccactttgtcaatccaaggaccttcgctgcttcatgttgccccttatcaatggaaagcagtccgcccctgaagatttcagcgaagtacgccgcatagtttaggatgaacgcaatcgccgctgcaacaaaacgatcaaacaccagatactctccaatcaccggaagcaacggtaaaccgaagcagaagaatagaatttggagcagtagcggtgttcctcgcatcacatatacatacgtatgggcaatccacgccagcagtttaatctggcttctcatcgcgagtgtgaccgcaaatccaagcggtacagataacacgatcgctagcaagaacatgaaaatggtagtctgcgcaccctctagcataggttttaaaatggtcaatagataatcccaactcattattttgtctcctctaatctgttaaccccgcattcctccgaagcataaatcgctccagcgtggaatccggggtccgttttgtttctaactatatatcaggtgtgtaacctgcctatttcagaaccttgtcttcacccaaccattgagtcgagatcttagccgctgttccgtctgcattcaactcatccagcgctttttgcagctgattcagaagctcttcattaccttttttgataccaataccatattgttccggtgcaagagattcatccatcagtttgaatgttccctcttctttggacatgtagtatctcgctaccacttcatcaatgatgaccgcatccagacgttttgtcttcagatccgtcagtgcaagcacgttatccttaaattcagaagctttcactttatccttcaggggacttgctgctagtgcatctgccgcggaggatagtgcctgcaatccaacatttttgccatcgagttcatccagctttgtaattggtgagtctgccaaggtaatggctacctgactgttttccagatacggcttcgtgaagagcactttctctttacgctcatccgtaatggtgtacccgttccagatcatgtcgatccggccactgttcagctctgactctttggaagaccagtcgattggctggaatgtgatttctttacccattttctccgctgcagctcttgcgtaatcaatatcaaaaccaacaatttcattctgctcgtcccggaaacccattggagcaaacttatcatcaattcctacaacaatcgtgttatcgtctttgcttgcggaactggaacaaccagccacaatcaatacacatatactaatgaataatagtagaatcgctttttttctcatctctcgaacccctccatgtctataaccaaaacccaaacgctttagttcgttaccacgttatcagagatttataataacatagcatgggagaagagtcgagtctcttgcctatttccttctatttcatgcagcttaattgtcaacaatctgtgaaaaggcctctttcacttgtgccagttctaccagcttctcgcgtacagtcgaattccatagctccgggttctgaagcttctttaattccgtacctgtccattgttgggcagattcacgacgtaaggtatggctggtattctcaaactggtagacgatctgctccagattatcgatcataacaaagttcgcaacaccattatatacaagtatccgctcaagtgcctctgcatccatcccacgcgtatccaagctataattcacttggaccgtgaacgtctccgggtacagttggtaaccattcaatctttcacgtaaaggtaaagcctgattcagatgactaaggtttgaattatcacccatgtagggactgcgatatttggctaaagtggcaaaatcatgtgtcagcggattctgctgctcttcctcgtaccgagcctgtttcgcctcgatcttcggattaacgaaaccttcaacaatcactaagccactgatgcccaacacaacaagtgttataatccatatgtttctaattctcataacgcatcactcacttcatacttactaacgatccgatacgcccgatgcacaaccaaaggaataataacactcagtaatgggatggcaaaggcaatgacgatcacagcaaactgataaggtccatccacctgaatgggtcgattaaaccagatgttgcttccgaatcgcaatgctgcctgcgttccccatagtacgagtattaataccgcccacaaccaccatattctgcgattccactgcactaaggcagggattcgaataaccgtggttttcacggaagttgcagaatcgttcgtcttgttgatcaacagatacaatacatacatgccaccaacaatgagactcacgatcataagcagattgtttatggcggagccttgcatcagcactctcattggaatggtaatgatccaggctatgaggctataaatcagagcagactgcaacaacgctgtccagtaaggaacacgttgtacccttcgatggtcactcatcacttcatccataccagcgatatgctgaatggcggtctggaacgccttctcttcactcataccctgcgagatataatcgtcaatccgcgcagcgagattgctgtgaatctcttcttttaattctcgattgtctaatgtatcttgtgcgtgagcgaacaaacgattcacatgacgagtgatgcgagcttccaatctcataggtcttcatctcctttttctccagtgacaatcatgcaatcaatcagtgccttggctgcttgccaagcatgaacctgctctctataggctttaaggccttgcgttgtaattcggtaatatttgcgtcgtcctccctgcgtctcttccccccagtaggactccacatatccactcttctccagcctcttcaaactggaataaagcgtaggttccttcaattcaaactgctctccgctcttacgatagatctccttaataatgctgtagccatagttatctgcgggtataagtacactcagaatgatggggtcaatattgccccgaatcagatcactgttaatcacttgcacatccatctacgagtttcaccgactttcttccgtcctgtgtatactataagacacattactatgtctgtaaaggtaatatgtatcacatggtaaatatgcatcgcaagagtaacactagcaacattcctctcttgcaaataaaattcttcaatacgataagaacattgaccacattggtatttctttcaactatgctgatattatccggctgtaatcctactccaagtcatggtgcaaacaaaactgcctcaccctcaactctttgcgagaaggttcattccagttagcgcaggaaaaaggtactcattattatggagcctttgcccgctggacttcccctcaaaattcccaggtttccttgggtgatacctcttttgccattgttatccgtggtgtggaaaaaaataaaaacaaacagggcccctccaattttggagaggcccttacgcatttttatctattgctgcactttctcgcgatctttccctttatccgattcccccgcatttttgttcgcagcatcgcgatcctgtttcatttcttccaccgttttcaccttgagtcttgccgctccttcatattccttcgttggaataaggtcgccagcagcgagtctcgcttctgcggcagcgatagcgtcaccatactgtggcaaccactgggcctgtgcaaccagcatctcgtcgaccatctgccagatttcttttggattacatacggcacccacgagcgggtccatcataaatgcctgacgaagtaatttgtcgtctccgttcaccgcggcttcaaccgcaagacgttgcacggaaatgctcacattacataccgcagccgggccaaggggcagatcgcctacatgtggcatggagatgccgttacgatccacatatcccggtgcctcaataatcgcatcatccggcaggttggagatgactccatgattaacggtattgaaatgtcctcgatagacacgtcccgtctccagaccttcaataatgtacgaaccgtgctcctcgccccgtttttccgaaatgaattgcatcggttcatccttcatccagttaggaaaatcagtctcgaaccagttgcgcccctcggtacatacccgcagatacccacctgtctctccgttaatccaattgcccaggtcgatccattcgttaatctcttccggacgtttgcggtaccacggcacatattcactcagatgaccatttgattccgtgctgtagtaaccgaagcggcgcagcatatcgatccgcactttctcggtgcggctgtactcgggatgtttttcgaaggcttcgagcagatcacctgtaagatccttaccttcatgagaagcctggatataccaggtctgatggttgatgccggcacagacaatatccacttcactctttttcaatccaaaagcttccgcaatctgatgatgaccatgctgtacaccatgacacagtccgatcgtccgtacaccaccgtacttgttgcaagcccatgtcagcatcgccatcggattggaatagttcaagagcagcacgtcgggtgcgctctgttcacgaatatccttacagatgtccagcatctcggcgattccccgttgtccgtacataatgccgcctgcacacagcgtatcgccgacacattggtctaccccatatttcagtggaatatctacatctgttgcaaatgcttccagtcccccaacacgaatcgtacacagtacatacttcgcatctttcaatgcttctttacgatctgttgtcggctgaatctgaatattcaatccattctcacggatatcccgctgacacagctcagtcaccatgtccagattgtgctggttaatatcgcagaacgcaatctcgatgttgttaaactcgggtaccgtgagcaaatcccttaacaatccccgtgtaaatccgatacttcctgccccgataaacgccactttaaaagacatccctatgtcctcccttaatcctaatctttcgcttcggttaatgactctcttcatgaaatcattgtaccaaccgcttatagggaagcgttatcaaaatcatgacctgttcaagatcttgttgtcaaaaatcctaacttttacgcgctagctccaataatccagttgtattcgaaataactgcaatcggctcattcatcggacgggtactgactgacatgtcgttccatagaggagcgaaattcaaccggcgtacgacctgtatattttttgaacaacatatgaaaatactgacgactgcctactccaacatagtcagagatttccgaaataggaatattcgtctgctgaagcagcatcttggccttctccatgcgaagcatcgtcaggtagtcggtaggtgtgcgctgcgtgtgctgacgaaaaatacgatgtaaatagcctggatgcagattgacggctgccgcaatatccttcatctgaatgttgcgatccatattgtgatgcatgaattcaatggttcgtttgacgtacagttccgcctgatctggcgcactccggctcatttctccacgcagacgtgcaacacggaccagcaactggatgaacaatgtacgcaccagcatgccctgttctggagacgttagatttcgggcctcgcggtgatgcaacctttcctctggcggaatgatcttcatcggcacgttcgatcttccttgctccagcagaccacgctgatcgagttccagcaccagacttttcataatgtgatacacctcttccgggtcaggcagtaccagatatggcgaagcattagtgagtagagtgtggacttcttcctcttccagcgcgagttggcgaatggatagctgtccaggaggcgagtttgagaatgcaaactccacattaagcatccggcaaggaacgccatcttccaccagtaaacggtgcgggacacctgcatctagcataatgaactgcccttttttcaaaatcgcctgctccgaactcccatccgacatctgcacatccacccggcacattcccgaaataatatacatgatctctgtcgaatcatgattgtgataggacatacgatagttgtcccattgcttgtagtagtacgcgtaaaatcgcggcccgcaatcctctgttcgcaaaccctcctgatacaagcttcctgtccaaggctttgtgatgctcatgtcgatacctccattccttcaacgatcgatcctcacttttctccattgtagcaattctataggttgaatataaactgtcttcgttaaaaccatcattgcattacttaattagataaatatataattagtatactatctaatcctttatgtaaactgtctataattaaggaggtttccactcatgagtaccacctttcatttggtacgacacggtctcaaagaacgacgaatcggggatgtccccctcacttccgaaggggttttacaagccgaagccacagcacttcattttgccaaagccacctctctcattactaagatcctgaccagcccacttcgacgagcccaagaaaccgcaagtatgattgcccgctacacccattcccatataaccgaagatcctcgcctgcgcgaacgtgccaattggggcgattgcccggatcagtcatttgaagaattcattgcgatgtgggatcgatgtacgtctgagccagattacattccacccgtgggagactcggccaaacaggctggtgaacgtctggcctccctcctaaccgaattagctaatgaagagccagagaacagtaacattattgtggttacacatggtggacttattactgattttctggtgcaaacctttaccgagcgcgagcttaacgtctggcattccgattttatagctatgcagaaccaattagtccccgagtgctccatcaccacattgatccatgatcaaggtaactacacgattggagcgttcgcttctaccgtgcatctagactccaattatgaaaatggagtgacgtaaattctaatggattggaactcgccaagctctatttcgcagaccctcatgtaaaaaagctctgaaactccctgtgctgagacacattggaattcaagagcttttaaggtccaataccaacgcttaaaaatgccaacgctgctttacgttaaagccagatcttgaacacatattatgttactattgctagctattattactccggcctgcttactttccgcccttacctggcgtgtagaacttaggcagcgttactttggaccagtccatatccgatgccatgtagaaggacggataggacggctggttgtatccactgttctgtccggcaatgcccacacgatacatcgcatcatgcatcagcgtgtacagcttgcggtctgtcttctcggtactcagatagatacggatcgctgaactgtccgtggttctcaccaacatctcttcccgccaatccccgaagatatcagctacgagagaaggtgtacctttggtgtgattgttggtcagtgtgcctgttgccgtcagcaacgtgccacgattccagtctttgatggttggtgtgacgtcgatggcaccatcaacgatctgtgtcgtcatgtcggcagaccaacgaatattcatattcgttcccggcatctgatcactgattttctcacccttagctgtccacaaacctacagcccatgtctcaagtccacgccgagtcggatcaacatcacccaccatgccgcgaccggtatctttccccgtgtacccaccatagattacttctccggtcttcgcatcacgcagggaatagccgtatggcgcccaaggaccaccctcgtgtaccataaaaatttcaagtcccggacgatccgggtcaatatctgccacatgaagtgcgtccccatgacccagacgggcaatcgttcccggtgcagcactctcggctggcatcaggtctgtggagctgtacagcacgctgccgtcatgatcaattgtagcggagccatagataatctcctgtttgccgtcaccatccacatccgccacactgaaatagtgcgctccctgagttgtaatggagccgtactgcggatctgtaccatctacgccgtgcggtccgtcattgaatgggttcttcatcggcgtccaaccgctgtccactttccattcctttttcagtttcttgccgtcccaattgtaggcaaccatcgtcgaacgtgtgtagtatccgcgtgcaaagattgcagacggcttcttgccgtccagataagccactccggctaggaaacggtccactcgattgcccggttcaatccgtgccatggcataatcgccccacatcagaccatcatcatgacgctcgggttcatatggaatggtctccagctctttgcctgattttccttcaaataccgtaacatactccggtccatccacgataaaaccttcaaacttgcgcagctcatttcggttactgcgttctacagcatatacatcaatgaagtagtcggccaggctctcggcatcttgctgagataatgggtagttatactttttctccattccaaaagcctcttccaatgtcgcaggccagttgcccttcacaacctcatcatgtttatgccagttcttgaacatatccaccacgtgatcgtagtaaccatccgcacttaaacgataatcatcttcgttcgagtaccctgccttgcgatcctgcttgggaagcgtgatgtacttctcggatgttactttcccttttttgttatatttgataatcttcgtgcccggagcggtcttaaacatcatctcggccttgccatctccgtcaaaatcgtaaactagcatctgtgtataatgagcacctgcacggatattgaccccaagatcgatccggtacaacaactgaccgtccaaggtgtaagcatcaatgtaggttttacctgtgtatcctttttgcgatacgtccttggcgttggaagggtcccatttgacgaaaaactcatattgaccatccccatccacatcacccacgctcatgtcattggcggaatacgtataagcttctcccacaggcgtcacaccatcggcgggtttttgcagtggaatgtccacatacccgttcgcccaaggtttgacggatgcactgcgtttgctctccttgcccttcttgttcaccgctgccacttcataacgggaagaagatttgcccgcggcatctacatagttggtgctgtcggtgacggtagcgatctttttgccatcacgatagacgttaaagtccgtacctgtcagccctttgtcgctataccctgtggcctcgtcaccaagcaatctccaactgagaaaaacaccttcagatgtcgatgcagccaccaaaccccgatccagatattccagttgaatctctttcacgtgactgccccccttatgtgattgcaggccagcctccgtcgccccattaccgttcgaagcttccgctccggtaatcccagctgttcctccaatgagcaaagctacgctgagtgccgaagagagcaccttggctgcaagtggcatacgagccttcctgcgaccggattgccgacctgacaccgatcccttatgtaccggcgctgttgtttctgagttcatccaccttcacgctccttaagacagaatgggtaacgtttgtacacatcgatgataattagacgttcgataattcatagaggccttcttcgaaagaaggtttcaacccgaaatgattacgcttacaaaattaaaaaagagaaatcagcttgcccgactaccagagtgcggtcccccttccattctctttccaatccgagcgaggtgatcccgcccatcgggttctattatagacatcctacctgccagaccctaggcaaatatccgtccaaaacgatcaataatcagtgtttttaggagtcatttaggaaataagtacttgcaactctgagggttatccgttccggttgatcaagaacttcaatctagaatgactcttgtaatgcatagcaaaaaaccgcgatcctctaacacacagaggatcgcggttaagacagttacaaataaagtttaaggctccatgccccataccaggtttccaccttggtggagtgttaccttattccaatcctggtaggatgttttcgttggatcgaaagagtagtcattcgtctcgtcaaagttggaccagtctgttttgtacatgcgaagctggatgtctccagtctgtccaccagcctgaatgctgccagctgcagatgtgaagctcagctccacatacgagtctgtgaaggtccgctggatattggctccgccaacttgagcgtaatcgatggcagaatccatcgcagctgagccttctttggagaagtaataacggattttcaggtcactcagattcacagcagtactgcccagatttttgatgttgaaatacggtttgatctggctatcttgagcattggtatctccagcacgatattgcacgacaagatcactcgttggtacaacgacactttgaggtgtcgcggaagctacagcagaattggcactttgccctgctgcattcactgcacttaccacataatgatacgttgtgccgttcgtcagggcagtgttggtgtaggacgtaccactcacattcgccgcgatcgttgtgaacggacctgttgcactcagcgcgcgtttcacatcataacttgttgcacctgtagaagcggtccacgtcaggctcacctgtgcattgcctgcagttgctgtgagagcagtcggtgcagctggcgccgttacacctgcaacaggtgtagctgttgctgttgcagagttaacactttcacctactgcatttgttgccgttaccacataataataggttgtaccattgatcaggccggtgttgctgtaagatgttccactcacgttagctgcaattgttgtgaatggacctgatgcactcagtgcccgcttcacgctataacttgtagcccctgtggaagcagtccacgtcaaggagacttgagcgttaccggcagaagccgtcaatgctgctggtgctgcaggagctgttgttccgcccggaggattacctccaccgttactggcaggcagtacagggaatgcgtttttcaccagtgccacgaattgatcatggaaccagtgacccgataccggagcattaggcaacgcacctgttaatacaccatcccgagttgtgaaggttggatcacacatccggtcaaaacctttgccttcgttattcggaatttcggagctggagccatcggattcacccggaggtttcacccatacataagcatccagatgcgctggtcctggtgcagccttaggtgcttcaccaatacctgcgccactggcattacaccagttcccccgatgctcccggcgatctacacgtccggagttcacataatcgttgatgttgctgcccgtagcagatgctggacggtctaccccgccccacccattccggctagtatcaatcaggaaacctgtgctgcttggccagccagcttgtacgaaatcggcatacagcgcagcggtgaaatcggtttcgtcaaaataaggattccactcataaaacttggcagatttaatcggttgtccaccgatattgagatcagggttagacaggttcggctcccccagcggtgtagtgtttgctgtgtttgtaatgaagccatctgcactgctcagacctgcggctgtcccttgcacaacacttgtatacagcgcgactgctgcagaacgattgttatcccacccaagccagccggagtggccgatatccagatagttgtacacatttggaatggcgtgcagcttgtccaatgcatacttcacacccgcctcatagatacctgttgagctggcttgaccacaagctggtgtactcaggttggtcacaaggttaggcagactgtccggttcaatgacagcaataatacgaatatcctgatacttcggatctgcgaagatatctgcgagcacatcaatataatccgttttataggtctgcagtgccgcctgtgttagtggaagctcaccattcgatgcaagtgcatgacaatcccgtccgggcagattgtaaatgacaaatgaagccgttattggtgtacccggtttcttttgagcgagaacggcatcaagatgttgctctacacttttgcgaccagcgttgtccgtaccgccatagattgcagcaatccggtcaacccatactgcggttggatacgatttgatggtctccatcttggccttcaacgacgcatcgttggtcagtgcaatggatgtatccacgagagctgaatagtcctgattcagataggccgttgcccctacaaatggattatccacatgtgcttcagccgcctgagccaagccgggagacagtccagggaaaatccccgccgcgagcagcgttgctgccaacatttgctttacacctttgcgcaggatcttcttacctcttgatttggttttcaatttagtcttcatagttccacctttcctttagttagattgggttgtactcatgtctgatcctctgtgtcattatgatgcttagcacgaagagaacgttcggatgagttggttgtatcacctccaaaagaaatggttgtatcactggaatctggagcaaacaaatggtgtgtaagggcgaatcatgtgaatgagtataatatggtgggtgtggttgaacgtgtgttagacatgaagaagtgtgaaaaatgacttatgggatgtctgaatcctaaatttggtaagcgctttcttcaaacggttaaaaaaaaggccttcgcctatccatctacaaacatgatgttcggtgtcacctccttatgttctgattatacgacatgtaaattttactgtaaattgaattatataaatttaattatatttttttccataattcaggcaggaatctggacatcccttgctccaaaagacacacgaggtccatcctggcaatctgccacaatgaacctcgtgttttacaatgccgaattaaccctctcgtctagctagtcactacatataatgtctcgttcttatattcctacatctaaggcaaaacgacaatgtctcccggtttcaagccactaaccacttccgtcttgtcccccgattccattccagcctggatcgtcagcggctcggtctgtccattgcctttgtctaacaatacgtaaggctcggtctgatcccgcatgatcgcgagactggacactaccgtcactttatccttccgcatcgtctcgatatcgccttccagactcacgcctccatacattctggcatccggcttcagatcaatgaccacgtcaaactgtgaagcttgcttgaggtccgtatcggtactcttgcgggcgaatttggacaccttactcaccttcccggtgaattgcaggtctttctgcgctgtcattcgcaccttaactggcatgcccaccttgagcctgaacatttcttcctcaccaacaatcgtcataaatttcagtttgctgatgtttgtaatagacccaatcagctgtccttccgtcaccgcacgtgtcttgctatcctcttcattcatctgaaatataccggaagcggaagcatacacaacagacttacttataactgcctgctttttctgtatctccttctccttgaggaccaacgctttttgattcaattcattcgtcaggcgtttaccttcccgatctgcaaatgccttcttgcgctcctcttccgtcacgccaagggtctcactcatattcgcctgatccagggtaacctgattcatcttgttttccagctgagctttctccagatcactctgcaactgttctacttccgtttgtaacgtggaagtatcgaggctaaacaggatatcgcctttgctcacctgctcaccacttttcacgtgccactgcttgatgttggaagcatacggagcgaagatatccgtctgatcggtgtatacggatttccctttcacctgtatcgtttgcgtcatcgtttcctgtgtcacatcaaaggtaatcgggggtggaatctctataggcgcctccggttttggcttgtacttttcatacagccagtaccctgcacctgccaaaagtacaacggtgatgataattttaatccatttcttcatgtgcccaatttccctttcgctgataaaattacattgatttgatcacagttaatgcattggtccgagatgcgctgattgccggatatataccggatacaatgccaaccagaatagcaaaaacgatgccaagtggcagagccgactgctgaataacgacggtcatcggaccattcatctgatctgccatctgactcgccagcagactgttcaccccgccgagggcagcaaaggcgatccccacaccagccacgccgcccattaatccaagcatcgctgcttccgtaataaacatctgacggatctgccatagatttgcgcccagcaccttcatcacaccaatctgtttacgccgctgatgcgtggacataatcatcgctacaataatggataatgaggccagcagcatgataaaaccaccgatccccaatgccgctttttggtacatcgccagttgacctgccatcgcttcctcttggaacagattactctgtgtgtttaacgtcagctttttaatctgttcttccacctgggatacataacgtttatcctcaaccttgaccagagctgagttaagatgcttggccacactgctgtcggcctgctgtaatccaagctcatcctgcaatgcacgagctgtatcgagcggcagatatacttttttatcgttttgagcgctcatatcatccatgttggaaggcttcatcagttctccagacacgcgtatagaaccactcattttggttttactcgcattcgcataatcttcatatcgaaactgaatacgctgctgcaccaactgatcctgcttcgcagacatttccgtaaactgctccaaaagctcattgttatatggatcagcattcaactgctcgaataacttctgagttactttggggtccacgagtccaaatgcagccccataactggttaccgccatacgaccatcctctgccccacgtccctcagcatacttgtatccaaacccgcccagggtctccagctgggtaccaatgacctcaacatacgtgctgcgaccatccggaagcaccatttccagcgaatccagctttaacatgggagccacggcaacaacatgaggaagtctttggataatctgaatcttttccaacgtcaatgctccccgttcaaacttcgatgtctgaccattccccttgccgttcccagtacgtatgccttcattgggcgtaatcgtgatttcatccatcttgtaattgtcgttcaatgttttctcgctataggtctgtacggactgccccacgctaagtgcaatgatcatggcggcagagccgatggacagccccatcatgcacagcagtgtgaccatttttctgcgaatgatctgtccccaggccatacgtgctacatcccgtattctcacatttcctctccttttgcctcaaacttcccttacagcttcttcgacaagtattccatgttgcagggtaagcacaacttgcatctgctctgcgacctctgcttcatgtgtcacaatgacaaaggttgtattcatatcccggttaagctgctgcaaaatcgcaataatctcttcctccgtctcggtatccaaatttcccgtcggctcatctgcaaagatcaccgagggttcggtaatgagcgaacgtgcaatactgacacgttgttgttggccacccgacaactgggacgggaacaagtttgccttttcacccagtccaacctgttccaacagcttcaatgcttttgctttgcgtttcgaagggcttatccccataaacaccaaaggtaattctacattttcccggatcgtaagattggacagcagttcataggattgaaaaataaacccgatatgactacgcctgaactcagccaggcgattttcactgaaacgtacaatatcttgtcccgcaattagaatcttgccctgatccggtttcatcagccccgccatcagattcagcagtgtggacttgcctgaacctgaactgcccagcagggctaccatcttgccttctccaatcgtcagattgatatcctgaagcaccggcacgattccctggccattgcggaacgagtgggataattgttcaacttgaagcattgctacatgtcttcctttctacttgctaaatatgtacagaggttgtatgtaaagattcgcgtagcacattcccttttattataaggtggagatgtatccgggctggcccgagttgtatccaacttgtaacatgtcataacaaaaagaccttgtccacagagcagatatcgccagctccatcagaccaaggtcttatattcgtatgccttccgcagcttaccaggctctgaaactaaagcggtacatctcacttttatccatcgtgctgcccactgcaaatagctcatcgtctttccatttcagattgatgaagttatcaatattgcggtagatcaccgtatccgacgagagcttgctgtcattcaggtaggcaatatgcaactcattcttcagtttctgattatccattggataaaagtaagcgattcgcgattcatctgcatccagttcgaagttccagatggaaccttgtactaccagatcatactgctcctgcgctgctcgataccgatacagcccctgtaccttattcatcgttccctggatgagcatatcaccattcttcagcaacttgaattgttgaatgtcttccattgcagcatacgccttcacttcatgctcgtcctcaagcgatacacgatagatggcataattgtctttcagcatcaccagcatataaaactgcttcagatcttcactgacctgcaatacatccatcacgataaacgtatcattcgaacccttcccttgtcttggtcctgtgaacatgcccattagctcatcatacgtgtagatgacttgattcgtccccatgctcagatcaacttgtttaaatgaaagatcatcctgaccgatgtaggattcgttccctgtaaacactctataatacgagttgtcgttcggaagcttgcgacgttccccgctctcaatcacatactcatatgtcgtcttctgcgcctgccccgcccggtactgggagtagatgattttcttgtgatccgggctaatcgcaacgccataatccgtattactcgcaatactcttcacttcattatcatccagatgcaggagagacagctgaagcccggaataggaggattccagttgatttaatataatcgtgttccgatctaccacttcaaaatcaaagattgcaaagtcattcggaatcttggtagctgactcgatctgaatcgtactgctcggtggtggtgccagccggctattgaattgctcactgggcaagatcaccgttctaggcttgagatttccgatactgaacagactgccaatcccgaatattcccccgacaaatgcgatcaacagccctgacagcatcaatctgtcacggtttttacgccaaaatccgggatgtctcatgcgttcatttcccccggaagactgatatttacttgtgtcccttgccgcatgatgctcttcatctccactgttcctccatgacgctcaacgatgttcttcacaatagacagacccagcccggcactgcctttctcggccctgttgattcctttatcctggtaaaagggttcaaatacatgctggagcgcttcagcaccgattccttctccctgatcacggatcacaatagcaatggaatcacctaaccggaaagattgcacttcgatgatggagttcacatcactgtacttgaccgagttatccagaacattgaggaagacctccttcagcttatcccgatctccctgtagatactgatgttcctccagctcatagtgaatgcctatattgtacttactggccttaatcgacatatcctcgcaagcttcacggataatatcggatacatcgatacgttcgaatcggtacgcctgaatgaccgcagacgagaccgaaacctccagaatatccgcaaccatcgtgttgagacgctggctttctttgataatataattcatgcctttgtcaaaaaagtcctgatcggtaaatccgttatcccgtaaaatctgggcgtaccccagaatcgtcgttagtggtgtcttcaattcatgtgtcacattatcaaaaaagactttgctacgcgcttgtatttgcttcacttcatcccgctcccgctcaatcacatcaatctgctcccgaacccgattgatcatgacggtgaagcttgaagccaattcaccgatctcatccttggtggtaatctgaatgtccgcattcagacttccctgggccacttccgcagaacgttttgtcagtacacggataggttgtgtaattttccgggaaataaagatggatgcgataaatacaaatacgaaaataaccgctgcaaaaaacttgatcgtattttgaaaacgaaggttgcgtttgaacaattccgtgtaatccttcttcatctgtacaattccaatcaattgttgatccatctggagcgggaaggacagactggctgtgacccggcccttatccacaactgtggtgtaagcaatccgggaatgtatggcttcctctacatcaggatggtcagaccgcttagcaacgttaacctcgctgccaacagatccgtatggcgaagcatcggggccatatactacaatctccccaccaacggctgatccaatctgctccgcgagctcgcgactccctgcttcgagagaatctctactcatacgtttgttatgtatcaggaagtactgattcagcgcgatgtccagatttcttttagattgcaccatatcctcatgcacttcccggtacatattctcctgagctaccttattggacagaatcaacaggacggagaatccgataaatacaatgaccgagaatagcaccaccattttgaactggatcgtccacttcatgtctgtacctgaatattcagcttgtaccccacaccgaataccgtttcaatcatcgaaatgccttgcacaccactatccagtttcttgcgaatccgttgcacatgtatgtccaccgttcgggtatcccctgcaaaatcaaatccccataccttatccagcagttcagaacgtgtatgaaccttacgatgatgggtcacaagaaataacaacagatcatattctttattcgtgagtccggcccgttccccgtctttccacacttcccgttcatccttgcggatctcaatatgtttgcctagccttaccacctcataggactgattctccagtgtctcgctgatcagatcaatccggcgaaatatcgcccgaatgcgcgcaaccacctcacggatatcaaaaggcttcgtgatataatcatccgccccaagctccatgccaagtaccttgtccagcatgtccgacttcgcagtgatcatgatgacaggtatcttggagttcacggatagttgcctgcacacatcaaaaccgctcatatctggcagcatcagatccagcaggatcagatccggcttcgaatcccgaagcagatccagaccctcttttcccgtagctgcttccttgatctcaaatccttccttacgtaacgaataggacaaaatatcgcgaatggactcctcgtcctcaataattaaaatctctttttgtctcatgatactttcgtaatctccctgctctatgaatttccttcatctgcctttattttgtatcccaagccgtatgcttgaatagagggaagcacgaaatgttacaactccgatacaactctgaaccttttggaaacaacatcccgatatacttggatcataaagagactcataccagaccggacccaagcctgatctgtatccaagggggattcacatcatatgaacagcacacaaattaatgatgcttatgtcaactataaatcagaaatcacaaggtatctatcccatatcgtcaaacaaccgcaagacgcagaagatctggcacaggattgtttcattcgactaatgaacgttaccgtggatatccctgaagatcgcattctctattatctcaaacgcattgcccgtaacctggcgatggacagcttccgcaggcggacccgtacactcagacgagacagccgtctggaggtacctacccatcacgtcgatacatcccaccttgaaattagcgaaggtgttcatgatcttgtttcccatatcaacaacaccgaacatcgtaaaatattagaacttcgcctcatccatggatactccattaaggaaacggcggagctggtgaatcgcagtgaaggcatgattaaatcctctgtcttccatgccgtcaatcgaattcgggccaaagtcatctcataagagatggctttttatttgcgtaaaatcaatatgcacgcagaaatggatggattatgacgggaccgaaatacctatggatatgtcaaaagacccaattttacaaatatcgagttaatttttacaaattgttatgactatgtgagattttcatgtggtagaatatggacgaactcatgaatcaactaatatttgggagggatttggttgggtaaattaacaggtatgcgaggagtagttttaaaatcactcctggcattgtccatggctttgccgcttcagatcggattatggaacggagatgcatcggttcatgcggaaggaccgacagacccggcaccgttcatccaggcaaaggttgtgaaccaaaatgcaggtaaaaaagtattgttcgacaactctcacggccagacggctggagctgcagactgggtcattgatggaggtttctccgacttcgggaatgcactcgcgaatgatggttactatgtcaaagaacttcgcaagacaactccatttacctatgatgatctgaaagagtataacgtattcgttattgcagagcctcaaattcctttcaaaacatccgaacaagcagcactgaaacaatatgttgaaacgggcggtagcatcttctttgttggagatcactataatgcagaccgtaataaaaaccgctgggatggctctgaagtcatcaacggctatcgtcggggagcattcgaagatccggccaaaggtatgagcaccgatgagcgtaattctgaagcgatgcaaaatgtaaccggctcggactggttgtccgataacttcggcgtacgtttccgctataacgcacttggcgatatcaacgccaatatcgttgtaccggcagatcaagccttcggcatcacagaaggcgtatcggctgtagccatgcacgccggttcaacacttgcaatcaccgatccggaaaaggcaaaaggtattgtgtacctgccaaaaacaaacgcaaaatggaataacgcggtagaccaaggtgtctacaacggcggcgggattgaagaaggtccttacgtggctgtatccaagctgggcgcaggtaaagctgccttcatcggtgactcctctccagtagaagatgcatcaccaaaatacttgcgtgaagagacaggcacacgcaaaacaacttatgacggttttaaagaagccgatgatgccgtgttgctcgtgaacaccgtaaactggctcgctacacaagagaactacacaagcttaactgaagtgaacggacttgaactggacacagctacagcgctgctgccattcgaagagccggctgcttccacagaaccacaagctgaaccttggtccgcgcctgctgccggatataagtggtacgatcgttccacgttcaaggctggttcttacggtggacctgcatccagcgcgaacgctgcatacagcttcgtgaaacaggatacccttccgaatgcagaagacttccagattcgtgtagttgtggagaacatggctccgaacacaaccgtatccggttatagtgccggtatctatctgactggtggaacacaggtcgccatgatccagaatgaaagtggtacttggccaacttcgtacggctatagttccacattcagtgtaacctcggacagccaaggtcgcgggatcaaagatctgaacgtccggatcaaaccaggtacaactggcgctgccagcttgcgtctgcgtctgaatggcagcaacctgatcaccaatgccgtgactgttggcaatgtgccagcagaacagcttccggaagaagaaggaccgattccagcggctatcaccgttgctgaagcacgcaccaaagctgctggcactaccgtaaccatcgaaggtgttgtgacgacagagccaggtgcatttggtggacaagccttctatcttcaagatgaaactgctggaatctacgtattccagcatactagcggcttccatgcaggtgacaaggtgaaagtaacggcagcaacaaccatctataacagcgagttcgagcttaccgatatcgttgcgattgagaaaacaggtacggcttccgtacctgctccaatcgaggttactgcaattacagatgcgaaccaaggtcaactggttcaattgaaaaatgtaacgattgagaatatcatcagtgctacaccagttggatcttttgaattcgacgcggtaacagcagatggaacgagcacacacatccgtgtagacacccgtacaggtgtgacggagacttccttcccttatgctgctggtgacaaaatcgatatcacaggcgtttccgctattttcaaagatgtatatcaattgaaacctagaagtttgaatgattttgtacctgctgaagagcaaggtggcggcgaagtgccttccactccagctgcaggagcaccgggtaaaccggtgctttcttctgataatggatataccactggcctgttcgaaggttcgtacaacgtaagcatgaacctctggtggggtgaaaacggttctgagtacaaactgtatgagaatggcgttctgatcgatacgcagaagttgactgcggcttcaccatcggctcagtcctccaaaaccgccattacaggcaaagccaacggcacgtatacctatgtagctgagctgaccaatgacaaaggcacaacacgcagtgacgtgctgacggtacaagtaaccaatgctgctccaggcaaagctacattgtcccaaaacaactgggatggtgacggcaactttaacgtatccatgaacctctggtggggtacaaatgcaaccgaataccgtctctatgagaatgatgtattaattgatacacaagcgttgaacgcggcaacaccagcttcccaaagtgctacaactgaattgtcgggtcgctctaacggaacgtatacgtaccgtgctgagctgatcaacgctgcaggcgtaaccagcacagagacaattacggttcaagttactaaagcattgcctttggctagctaagaattacgattatttaaacttgtataatcctcaaagagggcctttctccgtttaacggagaaaggccctctttctatttattctatgttgtttcgaggagcaaatccgtctccaaattgctcactcatacgcgcttgaactttgtaagcttcttgctgattgcgagctgtagcgaccacataaaaattctggtctgacgtctgtcctgctctgccaagattcagattaatattctcccatgctgaatcaaaccaaattagtccatgccataacgtttccaatggttcacctgattttagataatgaaggtttcccatatgaatgcctccttggctttccgctacgtagatagtcatcatatctccagttgttgtaaaatctttaccttcgattgtaattctgccttcgaacgtagactgacgaaatagtggacggtacatcgttccttctaccttaattgcagtcgattcggtagtttccggatcaacataaccagaatagatgatttatatgtcattagaacctccagttcacaccaatggtcaataagttaatcagcacatcacttatcttacttgagaaggaaacattggagctagaggagaaatcattttaaccgttttattctccactcccgtcagatcaattctagttacataggaattccttggctggaaagtatctaaaaaagctgccactgctaaagaacccgacagatcttattcggccatttgggccgaattttaaaatctaacgaacctcagcatcgctatttaactacatttcagttgccaaagggttaaatcgggcaaaacgcaacaaatagcgccactacgattcgttagaattccagtgatgccttgtgaggcaaaataggaactctcaggttcgttagcccagctcctgcaagtttacattttctaaataccttaacaacgatatagaaccctggtggttcatttcaaacgttctggctcatagccatttctaacaaatagaatgctgttccatacagcacaataaacggccacggcgatgacactaatgacaaaaatcaagttcatctgtgtaaacgtataactgcttcccgtgaaaatgatcaggattgcactgagtccaatattttctctgttatgttttttaaacttctgaaagatcattctgtacagcaatatcaataccataaatacaatccatataaaataaaatatttccataggtcaccttcctttcgaaaaactcatttcttgtatgggtatctaagaggagtattgattaatatccttaattccctttatatagaaacctattaatattacatggatttggaaaataactcaatcattgtgatgcatattcttggaatcctcttattcctcgacggttagctgagcaacaagaacgcaccgatgtttatttacagacacaaaaaaagactatccctgccaatattccggcaccgaatagccctctcttcttacgctatcaacttatcttaatttatcatctagtatattcgtagcgccacattaacccttacaccagcttcttacgaatataccccgagatcaagtcgataatcgtgatcatcacgataatacccagcaggattatacctactcgcggccagttccgagtgctgagtgcaaagatcagtggtgtaccaatcccccctgctccgattacccccagtatggtcgcggaacgtacattgatctcgaaccgatacaatgtatagtttaggaatccaggcataacctgcggcaggatggcaaaccacaactgctgcatacgattggctccggaggcaagcagcgcctcagatgggccatagtcgatattttcaacttcatctgcgtacaacttgcctaacatgccgatggagtgcaacccaagggcgagtacccctgcgaacgatccggggcctactgccttgatgaacaacaaggccatgataatctcagggaacgtgcgaataaagctgagtaccattttgcctgcacccgagatggaacgatgcccactcatgttacgggcagaccagaaggcaaatggaatacagagcacggccgagattacagtacctagtacggagattgccaacgtgtctagcagtccgcgcagcaggtcttctccctcaggcaaatatacaaactcccagtccggtgagaaaattccggctacaatggctttcataatctgagcggcagtttccttgaaaccagtaaacggtacaccggcaagcgcccagacatacacaaggattaacagtaacacaatgacccagcgtagcgggttcttccgtggtttaggccggatgcggcttatttcatttttcatcatagcaatttctcccgcagcttagtacttacataatcaatgaccagaacgatgacgagggtaaacagaatgattacgctggtcttgtcatactccaggaacccaagtgtggcctcatagtagagtccaatccctccggctcccaccagtcccagaatggcagcagcacgtatattaatttcgaaggcatacagcacataggatgtgaactgggcagccagttgcggcaccacgccatatacaatgagctgaattcggttcataccaacagccgtcatcgcttccagcggcccctgatcaatggtttccagcgtctcatacgtcagcttcgcgatcagacctatcgagaacacagccagtgccaagattccgggaataggtcccagaccaaacacagcaacgaacaaagcagcaagcagcagatccggcacggtccgaatcaggttcagcagaaagcgcgccggatagtagatccagcgacttggcatcaggttaccggcacagataatcgagactggaatcgcaataatcgcaccaatggttgtcccaatcagggccattcgaatcgtttcaagcatgccttgcacaatattatcaaagtaactccaccggggcgggaacatctccttaagcagatccagcatgttgggaaaaccttcaaacaactccgtgaagctggcatccgtctgcttggcactggcccacagaaggagcagaatgatcactaaggtgagcaaatgtttcgtacgcccaggcggttttgggcgattcacaacctgagccgggctggaaccaggttccttccccactccgcctgaattctgaagtggaacgttggactgccccttcataccacaacttctccctgctcatgcacagcctgcttgtccaacaattcgtcagccagaattggtctgccgtaaatttctgcaaagcgctcatccgttgcctcttctaccgggccgtcgaagaccacctcacctgctcgcaatccgacaatacgggtcgcatactctctcgccagatcaataaagtgaagattgacgatcgtcgtaatcccaaggtcttgattgatgcgtttcaggtcatccatgacctgttttgttgtaagcgggtcaagtgaagcaaccggttcgtcggccagaatgatttttgcttcctgtgccagtacacgagcaatagcgacacgctgttgctgtccaccagacaactgatctgcacgggaataagctttctccgaaatattcacgcgatccagcgcagtgaacgccagttcaatatcctcttttggaaaacgacccataatggtgcgcatagtggaatgatatccaacccgtccagcgagtacgttacgtagtacactggaccgtttcaccagattgaaactctggaaaatcatgccgatgtcacgtctgatcatacgtaaacgtttgccttgtgccttcgtgatggagcttccgttaatcagaatctctccctcactaatgtcgtgcagtcggttaatggagcgtaagagcgttgatttacccgcaccggacagacccactacagcaatgaattcaccctgctcaaatttcagattaatattatccaggcccttggtgccgttagcgtaagttttggtaacgttatgaagctcaatcatgacaatatccttctttcattcataatgatcaaccatacatgagtccttgctataatggcacaagccagcgcagcgtagatcacgctgaactggcctgtccattgctacgattaagctgttcccatccaagaaagctactacaaagtgaacagatcccgaactactttcggatcaaaattattcacctttcactttttcgccatactgacgaacgatctcaaacttgctatcatcggactctacataaccttcatgcgtatagatttctttgatgatctggtgaccttcagtatctttaccgatatcgatgaaggcttgtttgatcttcgcagtccaatctgcattcatgtctgtacgaacggcaatggtatcgttaggaataggctcagtgaacgccagtacacgtgtatcttcaaatacagtcggatagtctttagctaccgtgttgcgggcatcttggaaaatagctgctgcatcaacgtcaccgtttaatacagcgataacaccttggtcatgacctttcaacgttacaggtgttacatcttttaatggatcaatgcccctgtccagcaacagacctgctggccatacataacctgcggaagacgttacgttttggtaagccacttttttacctttaaggtcctcgatggattgaatcggagagtctttttttacaatgaacatggatttataggaatccgccaactcttcggttggagcacctgtctcatcatttacaccgaaacgttgtgcttgcaagataacctgcgcagcgcctttttctttagccagtacataagctgtcggaggcaagaaacctacgtctactttgttggacgccattgcttcaataattgtgttgtagtccgtggatacgctgacttttaccggaatgcccagtttgtcaccaagcaacttctccagcggtttcgctttggcttcaagcgtatctgcgttctgggaaggaacaaattgaaccgtcagttcagttggcacataaccttcgacagctttctctttctctgtctctgccgtagacgtaccggatgcattcgaactcgaattatccccgttagccgaacctgctgtactactgctagacccacaagcactcagaaacagaaccaaaatcaacaatggtaaaaataaagcagacttcttcaaacgaacaccctccaaagagtttctatttttcagtacttatctactatagttgccaaatattagcgcgatgtgaaacgaaatttggagttttgtaaagtttcctgtcaggctgtcagcgcgacttgtatctgttagaataggctcattatggttgaagatataagaagaacatcggagataacggcgcatacttcggttcttcaagctattcattcttctccgttttatagtaattccatatatctgaacttatatattagaggagattgtaaaatgacatccacaaaccatacggcaagcttcgatattctgtataccagtgatctgcacggggcgatccgtcccattcattacaataccaatgcctaccgcccagctgggcttgccctgctggcttccctgattcgtaaggaacgtgaacgttcacctgaattgatgctggtggataacggggatctgctgcaaggatcacccttggcctcctatgcagcttcacaggtttccaaaaacgaggtgcatccattcataacggtactgaatgaactcggttatgatgctgcggtgatgggcaatcacgagtttaactatggtcagagtctgttgcgcggagcagttgaagcttccaatttcccttggctgtctgccaatattgtaaaagatgagcaaccagacgtacctgccttcggtcctccgtatctaatcaaaaccttatctacgggtgtcaaagtagccctcttgggcgcaactacgcactacataccgaactgggagcacccgaaaaatattgaggggttacggttccttgatgccttggaaactattcgtgcatgggttagctatatccatgagcatgaacaaccagatgtaatggttgtcagttatcacggcggatttgagagtgatctggagacaggcgagcccaccgaacggttaactggggaaaatcaaggctatgccatctgtcgggacatcgaaggcatcgatgtgttgcttaccggacatcagcatcgtcagtttaccgctaatattcatggtgtaaccgtcattcagacaggcttcagtggaaatggtgcggggcatgtatcccttcagttggaacaatcatcgggcggcaagtggcagattacagataagcaggctcggttgttacttctggatgaacatcatgaggttgaacctgatgcaaccgtcatgaaactgacggaagagctggaaactgaggcacaatcatggcttgatcaacccattggcgaggtggctggggatttatccatcaccaatgctacggctctgcgactcaaggcacatccattcattgcttttgtacatcaagtgcagatggaagcgactggagcgcagctctccaataccgccatgctgagtgaagaagctcgcggtttcgggagtcacatcaccgttcgggacgtgttatccaacttcatctatcctaatactctgacggtgctggagttgagtggtcaggatatccgggaggcactggaacaaacggcacgttactttgaagtgaatacttctggtgaggtggcagttaatccggcttatatggaacccaaacctcaacattataattacgatatgtgggctggcatggaatacgagctagatatctcccaacctgttggcagtcgagttgtgaagttggaacatgaaggcaagccaatggacatgaatggcatgtactctgtggtgatgaacagctaccgcgctgctggcggcggggattatgcaatgtatccgggcaaaaaggtactacacgaaggtgccacggacatggccgcactggtggaagattacatccgcagacaccagccgttaacggtggagcaggctaataactggaaagttatcggaagttaaatgagaaagagcaggtcctgtgatcaggatctgctcttttgttttcaacctattgcttacttgttcttgttgaattatcctatcctatcctgtcctgtcccttcatccgacatattgaaggattaactgatataatgctattgaaaatcctaagatactcgctttcattttagatggatgatatctttcgctacgaatcaaataaaagaaaaccaaaataaaccctgcggggatccatagctcaaagacaccatttgttgtactttgagaataaattggcgtaatgaacgtactaattaaaaagtaaaagaaaaccgtaaaacgtcttgtttctaactgcttgctccaccttactagaatgaaaataataatgattgcgataataataatgtgaacagggggtagaagaatagcaacattcccaaatttgaattccattccgcattgccctcctctcttttaatgcatcacatgactgactacaggcatacgtgtaaaaattcattctcatgcttcaaaaccgctggcaaccgtccaaaaacggacctattccaatatatccttattttaacatacaatcacagttccatttcccacgtttattcaataaaatatgcaaaaagagcagaagtgaggagcatcgtgccctcatccctgctcattttacatacctacaagttttctaatacatgtcccatattatccaaaatgactattgcgcctttttacgcagctgactgtaatacagctcgctgtagaaaccgccttgttccagcaatgcatcatgcgagccttgctccagtagctgcccatccttcagcaccagaattcggtctgcctgacggatcgtgttcagcctgtgggcaatgacaaagctggtacggccttgcatcaggcgttgcaacccttcctggattttaatctccgtaacagtatcaatactgctcgtcgcttcgtccagtacaagtatggatggatctgccaagattgcccgggcaatggcgagtaattgcttctgcccctgactaatgccgctaccgtcggcctggagcactttgtcgtatccatccttcattcgcacaatgaaggaatgggcattcgccagccgggaggctgcttccacttcttcatccgttgcgtccagacggccaaaccgaatattttcccgaattgtgccctgaaacagaaatgaatcttgtagtacaaatgccatatgtgaccgcagattctcacgccgaatggtggtcatatcgcgaccatctaccgttaatgtgccacctgttggatcatagaaacgggataacagctgaattaatgttgttttccccgctccggtcggacccacaagggcaatcatctcccccggtttggcttcaaagctgatctcatgcaaaatgttacgtccttcatcgtatccaaaggatactttgtcgaaacgaacggctccctctaccttgtccagagatatcgctgccccttcatccttcgcttcctcatcttcgtccagcacctcgaatacgcgctcagcccccgcaatcgcggacaataacgtattccactggttcgccagatcattcagcggacgagtgaattgacgggcatattccacaaagataataatcaccccaaccgtaacggaaccctgaatcgccagaataccaccgatgcccgccacaatcgcaaagctcaggttgttcaatccattcatcagtttcgggataaaaccagagatcgtctgtgcccagaaaccggaaatccggatgcgggtatttcgttcctcaaaaccgcgaatcacccgctcctcttgggagaatgccttaatgatccgctgcccggataacgtctcttcgatataaccgttgagttcacccagattccgttgccgctccttgaagagcggtcccgttctgcgcgtaatccaacgcatgccgatggccatcaaaggcacaacgataaaggtaagcagggtcagtagcggactgagccagagcataaccccaaacgttccgagcagtgttaatacactcgaaaaaatctggatcgccgagctgttcaacgtaccgctgacattctcgatatcattggtcacccggctcataatctccccctgctggcgtttaccgaagaatggaatcggtaatttgtgcagatgggagaacagatcataccgcatgcggaacacggtttcctgtgcaatttcgatcatccatatattttgtaaccaggatgtaagagagaacaagacatacactgcggttaatccaatcagaaaccgagtccagcttgccccggcttcgcccgcgatgaaatcatccacggccacccctaccatgtatgggccaagcaaagcgagtgcggaactggcaaacaccatcaacagtaccatggacagcttaaccttgcgccgtgccagataggtccagatacgacctaatgtaccggaccagttcttcgcccgtgccttgggtttgcgaccaccgcctgatcgtaacgtctccggatcaatcggcggtggcggctgacggaaaggctcaatgaatgctttgaacatgctgtgcaccctccccgtattgtgattcatggattcgacgatacagctctgacgactccatcaggtcttcatgttttccttgcccaatgagttgtccatcatcaagcagcagaatcaggtccgccgaagtggttgaactgatcttctgggtgatgataaacgtggtacacgacaattcctccagcgcatcgagcagtctgccttctgtagccacatccagcgcacttgtgctatcgtccagaatcaaaattcttggtctacgtaccagtgctcgtgcaatggaaagtcgctgcttttgtccaccggagaaattcactccccgttgacccagcaatgtatcataaccgtttggtaaattctcaattgtttcatggatctgcgcgcgcttcgcggcttccacgatctcatccaaggtagcatcttcctgaccccaggcaatattctcccggatggaaccggtaaacaggacaacctcctgaggcacataaccaatcgcaccacgcagcatggacagatccagctctgatgcatcggcaccatcaatccgtacctttccttgaacctctgtgtataaacgcggaataagctgtaccagcgaggatttgcctgagcctgttgctcccataatggcaatacgctcccccgcttttgccgtaaatgtgatgttatccagtactgtaatttcactattcggataactgaagcctacactgcggaattcgaccgctccctgaacagcgcgctgtttcttcgccgggaatacagattgcggaaaatgcgaagatttcatagatccagcagatggtgcagacgttgattctgccttattctgttcagtctccgacgtgtcctccgtattaaacacttcattcagcctttgcgccgaagcgcttgctctggagaaggttaccagaatccatgacaacgcagacatggcaccaattgtgcgaagcagatagttaatcaccgcgaccacttcacccacggttgcattaccggaggcaatgtcgactcgtccaaaccataacacggcgatgatacaaacgttcatcatcagcagcatgaacggcatcgtggtctccgtcaagcgcagcgcggaaattgtgcctttcatcagcttgccgctgaatccggcaaagcgttcgatctcatggctcatccgtacgaagacacggatcagccgaatgcctgtcagattctcctggatgactccattgacggcatccagtctgcgctgcacattgcggaacagcagcgctgcctttttgatcatccacactacaacaatgagcagtacaggcaccatgacaaccagcagcagacccaacctcgggttcacgattactgccataatcatgctaccaatcaccaccaggggcacacgtgtcatgaatcgcagactcatgaagacggtgtcctgaacctgggtcacgtcccccgttaatcgggtaatcagggacgacgtcgcgaaccggttaaagacggcataagagaacgtttgcactttctcatacaacttctcccgcagatcgtatccgaaccccagacttgcatgggatgcaaagaacgaactcgcaattccggcagcaaaagccacaacagcactgccaaccagcacaccgccccacaaccagacgacagaaaggtctccctgctgaatcccgttatcaatgatcttggagatcagataaggctgagccagctccaccgcaagctcaattaacatcatgaccagggctgcaatcgcggcaactcggtacttcttcaagtagtacaacagcttgatcataagcattcctccggctcggagcaccctaaaccgataacacgttccagctcagagcctccattagacatgttgttttctccacagcgtccaatatgtaatcatttctatgtacacatatggttattatagcgtattttacaatgccgcttctattcttattaccctacttttcccaatacaataaacttctcttcattttggcagtaaaaaaaggaaggtctcccttccccacactagttaagtgcttacagctcgcccgctcacagacatatttcagatcaaaagaaatgcatatctacactcaggtcatctgcctaactttgcagaaatatagttatctgtttacataccaagcgagatgttcactaccatcttctgcgtccacgatcaccccggtagtcatcattcaactctcccaggcgatcgtatgtctctttatatatccgaatcacggcctgaactttgataaaatcagcatcttccggtccaagcccctccataaacattctctgaatgatctgttggaagaattgcactctggcctcaatctgttctcgctcaagctgtaatatgtcttcgaaactgtggttccctatgtaatccatcaactcatcatcatgtctggaataatctgagtttctccgatctgcaacccattcatccggctcattggactggagattaacactcgtacgtagttgggataaaatgattttctctttggccagcatgacatgaaaatctttgttacggagcagctcagatacaatcagactgcacatttcacggttttggatcagtatgccgtcaaatggatgcagtgtccactccccgtttgcataatacaggttaaagttaaagaactcactgccatatttgtattgaatattaatcttggtctcatcaataatctcgaatgaaaagtccagcatgttcagcaagctccttcgtataaccccagattttagctttatcctatcaaatgaaacaaagagacgcactcggcgtccctcgtagaaagatatacatctagcaatctcctggcttatgcagcgagtctcgccctattaccctaatccaggaaagatcctaatgcactggaatccggtttatttttctccggaatggcagcagcttttggcccttccagacccagtcgatcgctcattttagcgttaagggttgtcatcttgttggtatagtcattacaactctcgatgatccggcgattagactgctcggacaaatccagcgcagacatcagatcacccatcgcctgattgacggcttcaagggacatcgccggtttggacaacagttcatttgttttctctgttgttgtcttcaacaatctggcgttctccttgaattgatcttcaatcgtcttattcgtcgcttccacagcagaaatgaccttctcctgatcattgagtgccatagcaatcatggccgaaacggtgatcagattcgctgttttatcaatggcattattcactgaatcaatcaacttgtcattgttatcattaatgatgtcggtagctgcgatcgcctgattgtacagcataatcatctctgtcatggattgggtacgtgtaaccactttgcgcaacccacgctccagatgtgctttacgattctcgttctcgggctttgcgatctcagtttcaaacaatgctttcaattgattaccaaaagagattttggtctgcagattgtagatctcctgaatggaagaacgtttcaattgacgcatgttcacgatgctttcttccaggttgtccttgccgtcccgcaacccgttaatgatggcatcaatgttcgtacgaacggattgataacggtatacgtagtttttcaacgggcttttacgtaacaacttcccgacaaaactcacatttttactctgctgcaaactctcacattcatcacggagcttcaggatcatgtttgatacctctgcccgattcccggacatcagttcattgactggacgatcaagcaacttgagagtctgccctgctctctcttgtgttttcacgcccaacttgccgatatcatccattaaggtatccagatgagccggatcactttgggacactttctgaataagctgtgttgcttcctggttaatccgttgctcatcttcctgcttcaactgagcccattccgttgccatgccaatccctcctataattcagagctgttataccgttgatgtattagttccgctttgttctggagctccattaagtctttatgttcaatcgttgatacaatatccgatatcttggaatccacgtctcgaagaccattcagcagcatacgccgattattacgtttggcttctccacttaaacgtaaaaatggattaataaaaccgttcaggtctttcaaaataagtctgcgcaccgtatggttgatatctccgttatttaactcctgaagggaagggatcacacgctgcaaacgggcaaacaacgccagtgatttctccacgatctcattatccagctcgttcttctgaccttcggagatgatcatgtcctccagaacttccaggtattcaatcactggatcaaatacaggatctggttcagtccgggaaggcttcgcttgttctgtgcccgcatgctgtgcgggagtggaactcggttggggctctgccagagaagcttctcgtgcccctgttggcactgtgctcggtgcttgtccaccattcaagcgggatggttcatttccgatatctgtaatgggtacaggggctgatgacgaaccctggacctgtgtacgtgacgtggaacgtgaaggaatcaatcctccgaccacagttgccagtgccggaattgcccacgtgatgacatccggtagaaagggactcgagatcgccgcgagaccataaccgaccaatgcgcctatacctatcttcgttttccgtaacattacttgtcctcctgccttaacaacacatacagtgcatattcaaaaagtctgattttcagtaccaagaagatggactttttgaataacctctcatccgtattgtaaaaaaaccatccagaaggtgtcaatgttgagggaaattctcagctagacgtggtgtactccgcttaccttctgaacgtcgattataaatggctgttcgatatgacttcccagtatgccaaacttcggatgaagtggtccaatatcatggccaagtgcagacttgaccgccagatacgggaagttcacgcccgacagacaagacatgtgcaacccacccgacatacgcggattaatctccagtagcttcggtgtatccttgcgatatttcatctgtatattaaaattataaggaatctgatatacctctgccacattgcgggcaatcgccagcaattcctcgttttcttcaagcaagcgcaaacgtcctctttcttttctacgcgggatagccgttataagtttcccattgcgatccgaaagacaatcaatgctgtattcatatccttccagtacctccatcaccatgacattttgaaaggacggagcagaagagaacgcacgcagggcatcttcatacgaaatggagttaagcgcgtatccgaacaactcctgcaacggatcacgttcattattaatcactcggaatcccataccaccctcaccattacatggtttgaagcatacatcgtgtccacgtgcacgtagcgcctcataggcttgctggaattgtgcagcattactaaccgtgaaataatccggaatctccataatgcctttctcacgcactgattcatagaaacggtctttctccatcaattgttccagcaattccgtgtccgagcatacgataactcttgtacctatctcttcgaacagggagatatgtctgctgatgtccagcatgttccagcgtggaataaacacatcaatctgatgacgacggcaaaagtcgaggcaaaaatcaacatactcccggcccgttagacgcggttcaacttctgcaacatcacagccctgtaatgccatatgtccaggatcaggatgagtaccgtagatctcaaattccataccgtcctcattgtcccgaatcgcattcatataatgatacgttacagagaaccaacggttgaagtaaatcttcatttttttcatttatacggtctcccttatctcggcatggtctatctgggtctgttgatcgttatgaatacggtgaacgtaatcgagaatctcatctgctgcaaaagcaccgaattgttccgtaaattgatacggtacctgctcaggtacacgctgtctctccacatgtaactctccgtgagacggagcaatggcgtagtgcgcaaagtccagcaaacaacgatccagcaaggaatcacccgaagcaatcacaggcacatcgccaatgcgttgcctaatatgctccactgcagctcgtttgttcacgggcgaaggcaccagatagagcttccgcccctgaatcgaactctcccatcccagcgtctctaacacccgaatcttttccgcaatatgctccattggaagcttgtcacgttcgatcaacaatgcaaagaacagctcatcacacaatcgctgattaattacccactccgggctcagcacatcgtcaaataaattcaggatctcttcgggagtagctgcctgctgacgaagcaaagaacgaatatacagattccattcatcgtctacctgaccgtcaacaatgatgttgccaccattactcgtcaccgcatatttcggaatacattcgctctgaaaaatatgaatgcgccggtactgctccactgtacgtgtcgtcaccggcataaatacaatgtcttgtggcaaagactgcaaccgctccagtgcatatgctgacataaaagcggacaacttgccgttaatccactctgcgggaacaagtcccggtgtatcttcgggaatacggagcgcacgacgggagtacaccagcgtctggtccagatcacttgcgtagatcatcattctccgccacctcccagggattgaataatgccgcaacaggaataggttaatcccggatatacctcaaccggcacatttctgtctctggcgagcatcatgatatgttgcaaatccggattatccagacggtccacaagaatcttccaggggacccgtcgcaataacactcgggttgtttctccgattccaggtttgattagattgatgttcgcaataccaaaggattgctggatggactcgatatcctgccagcctttccaggtgatttccgaagtactggtagcattgtcgtccgagcgaatctccacttgttccatcatctgcggaaaatgctgagcgatggtatccacatactggatcgacacatccgcagaggaccattcacgataccatttggccccgtgaaaatctgccggtccaatcagatcatcgcgaagtactgtacggctcaccagtcccgataccgtggaattcagacaagcactaggaataagataatcttcccttgtcccaaaggtgcctgagcattgccccggatcggccaacacggcaagatcatcatcgagacttatgccataagtccgttccatttggtcacaggattctttcagcactttgcgaatagccccttttcctgtccaaccgtctacaaactgaatagctgttcccagaccatgctgctgtaaaatatataaaattgcgttctcgtccatacccttgccacggataatagaaatactataatgcggaatcgtcactttgtatttcaattcaatataacgtttgatcaggatgcccacaggtgttccggctcgagccagagataccagcacaagattcagtcccctgcgctctacaatcttctcagccacaatggcggtatgacgtgcaattcttgcaccggattgttccagtgtctgatggaacagctcgatgtattctgctgtgggctggtattccacgggcagcatctccgaataatgaaccccggattggatcgcctgctcccgttcacccgttcccttttccagatccacatgactgatatccttcagtaggaaaacaacgtccgatgcagcataactgcccatcggttcgggagacggaatctcacgttgtctgattagctccaatgtagttaagttcattgctcgttgtcccctgtcttctctggcaagccgcaatatacaatatgaatgtgtccacaccccaactgccccagtaccttcaacatcggttccattcgttcttcggacatctgtctctccagcagaacaaaaatctcatcatactgtcccggggcgatgttatagataaagttacgaacggatgcgtcttccggtgaggcatatccggcaccactacgaacagcatatcctggagccggatgtgtatggattggactgcgggtagtggattgatacaacacgccttctcccatctcggcagcaatacgcatcggaatgtacatgaactcccctgttcccatcaccaaagtccgttctcccgtacgctgcgtccgaagccgttctgcaatccggctaatctcctggcgcaattcgccattatgacgggattgcataccaaacctgcccgtatgttggacgtagctcgctgtgctgcgtttgccttcaccatcctccgaagtggcatgtagctgttcgaagtcatcggcaacggtagaagtctgaagcgttacggcaggatgaaatagctgctcatcttgctgtgttggttccaaatgtggagtacccactacttcaatgcgacccttcaacaggcttaacggtgtaatggtaatccccagttcagcttccagttcgacaaaccgaagttcgtccgcttccgtacgccagtccaacagcgaagcaatcacatattgcttccgggggtatctggcctgaatatcccgaatgatattcaacgtcgttttgcccgtcgtaatctcgtcgtccaccagaacaatcgggccttctcctgcaaaagcttcatgatccaacgcataacaacgatgagccatcgcatgggaatgttcttcttcaaattgaatatctggatgcatcgctggaacatactcgcgagtggtgtgaatataagaagcttgatcagcaaacatctcgtacatgctgtgacccaacgctgtcgctgtctcggcaaaaccaacaaaacgaatcgtttccggcaaactcaagctttcttgcaacagcatgttgtacacttgccgggcttgttggggatcaatcagcccctcgaccatttcccgtttccactcggtgatctgaactttcgtctcttccgtcttttcagtcaggtgctcatataacagaacagccaatgccgcgccactcagaagcgaggtatacgggttaaccgggatgtgcttgcccagcagtctgcttacaaacagaaatgaacgtttcttattgatgcgtgcagccatggaaaatagagattctagtggaagttgcagcgggttatgtgtaacctgaacgttcagactgaattgatcaagaattgggaacgtagttatgttgttgttcgtgcttgggcaagagcccgacaaaatgctgctgttcatgtaacaccccatatatttgtgatcggattagaattcgattcgcccagctcaagtgtggtttaatctcattcattttgttatagtaattacttttgaacacacccaggctaccgtcattacgggcgatgatgtcttgggcatcggaatattcctcatgtgtaacaacgtacatcgcttgtacgggcttaatatgagaaggatgaatgatcgttttgcctacaattccattttccttgtccatcatgacttcacgcatcaatccatccattgtgttcgtaatatatttcattctcagatgcagccctgatttgcccagggtttcttcgaatggagtctgtcgtaattgaggtttgaacacgcgctcccgctgactgaaatattcccagacaggacccgagatcacatacggcttgtccattcgtccaaacagattgataatatccgagatgcagtcacggatcgtggcgatatcgtatatggtcaattccgggcttcggcgtagtccaaacaggctggagaaatcggtcgcaccaatgcgtacattgagcacatattcaacattttcatcgaggatgttacgaaggcccagtaaggtctcccaacgtgtctcccgatatataattgaagccgtttccaatataggcattccatagagaacgggataatgatccggcttccgttgattatacttgcggatctggtcgaaataggctcttccattgcccacgcaaaacttgggcaaagccacgcctgtcagcatggacaccaattctcccaacgtatcaatgagacgttccaactgttgtggtgaacgtacacgagcaaacagaagaggcatttgatcctgactcagcatgcctgtctccatataagtcatcagttgagttagatgctgtaccagacactgctcggcaaactctacttggtcgtcacccacagcgtcctccagatcaataataatggtcgtcagaccttcatgtttaccattcataatgtcgtccgcgatatgtgtgcgcgtcgcgggcatatataaagcagccccaacagcatatgccagtagatctttggaagtccggtgattgaacgagacgggtgaagagaaaaataaagtatcttcttcttccagactcaaaaagttaaaatatttcagggttgtctcctcctcgcacctttggcaatagccaatctgcaatagttgattccagctgtcggggcataaaaaccaatccctccttagtctggagggattgatggtctattatcgaggataacgttggtcaacagtatccttgcaatggcgctgaccgatacagcgtttatatattgattaaattcaaatgattactttcttcccgcaacccactgcattccccaatcatgagcctcgtccaacgcctgatggccattatagaactgcacgattcgttcaatactgaatgtctcattgttcacattgcgtaacatcgcgatgccacacatgccaagcgggctcccgtattcattcattcggacaatgatatccgggccatccttctgctggatagttaccacaccgtctacttgagaccagttggccacaccaccataaatataggtaaataccaagatgcgctcaatttccgagatacgggcaccattaatccgcagattctctcccgtcttaaccgatcccgtccggtcatccccatctagtgcaatataagggaaacgattcagtgaaccaaacgtttgtcccaatgcctgaatcacatctcgtgtaccatccttcatctcgaacagacagcccaagtccagatccacactcttgctacgaccaaacaaccctttgctaccctgttgattccagttcaggttaatcaggatttcaccaagtccccccgcatttttcttgaggttaatggtgtcgcccttcttcttcaattcaattttgctgaaattgatcgaattcacaggagcaggcgtcggttctggtgtgggtgccgggggtggtggagtcggtacagctgtcgggggaacggttgaagtcgttggtgcagggtctgatccaccatccacatccacaccaaagttagcgcagagtgcattcaaaccacctgcaaaacccgaccctattgcattgaacttccattctccgttatgacgatacaattcaccgatgacaatcgcggtctccactgtaaaaccgcttcccagatcatatctcattacttcctgacctgtagctgcattggcaaaccgtagaaaaccatgctgaacctgtccaaaatgatggcgtcgtgcttcaccgtcatgaatcgtcaggctgaaggcgattttctcaattcgggcagggattttgccaagatcaatggcgaattgtttcttctcgccaccaacctgtccaccatccatatacgtgatgaacgaggtagagggctgattataaaagataaaatcctcatctccagccactttattgtctgaacccagaaggaatgctgatgtgtccagctctacacccgaggctgcctcccaaccaatgcctaccgttagacgggacaagcccggattggttttggtcagatcactcttctggcctttcacgacagaaatcgccatagcagaatcacctttctatgccaagttatgttattgtgcatccagcccgtaatttttgcataaagcagatagtccaccagtgaagccgctgcctaccgcctggaatttccagtccgcacctgcacggtaaaactcacagaacactacagctgtttcggtagagtagtcttctccgaggtcgaaacgaagcacttcccgatcacttgcagcatctacaacacgaacaaaagcattggagacttgtccaaaattctgccctcgtccatctccatcatagatggttacggtaataccgatccggtgaatgtgcgcagggattttgctgaagtcaacgacaacttgctcatcatcgccgtcaccctcacccgtacgattgtcaccggtatgtgttactgaacccgcaccgccgcttggattgttgtaaaaaacaaagtcatccgtacctttggcttttccatcttcgtacaacaaaaaagccgaggcgtccaggtcaaagtcgactccaccactatatttgtttgtatcccaacccaaaccaaccaccacacgggtaaggcccggattcgtcttagtcaggtcaatacgttgtcctttggcaagactgatcgtcatttgtttttccacctttccaaaatatgtgattaaatgaaaaggagaaccgtccaggagacggttcttcccatcctgtaagtcgtactgtacgtcctattgcaaaccgtagtcgcgtgtcaatccaaccaatccatcctggtaaccactaccgatggcactgaacttccactcaccgctatgacgatacaattcaccaacaactacacctgtttcgatggagaagtcttctcccaggtcgaaacgaatcagttcttcgctgtttgcttcgttgacgattcgcacataagcacgggagacttgtccgaagttctggctacgttctgtagcttcgtagatcgtaatggagaatgcaattttctctacatttgcgggtacgttaggcaggtcgatattgatctgctcatcatcaccatcgccatctcctgtacggttgtcaccggtgtgaacaacagaaccattttcattttgtggattgttgaagaagatgaagtttttctcgccttctactttaccgtttgcattggcacagaataccgatacatccaggtcaaagtcttttccgccatcatacttattggtatcccatcccaggcctactgtgatttttgtcaaacctgggttcgttttagtcagatcgattttttgacctttagagagattaattgccatcgtatgatcatcctcgcttatttaagtgtattgtagttatcgtgacatatgaatatcaggattattgtcgatttaggttaaatcttgtacttaggagtacctgcgagcgagttcattgatatgtaccgcatgggaaccctctccaattgccgagaatttccattcgcctccatgacgatacaattcaccacagatcaacgccgttgaacctgtgtagttttcggatagattgaacttcacgagctcactggaatttttaccatccagaatacgaatataagccttctcaatcatgccaaaatcttgcttgcgattgacacaatcgtagatattaacaacgattaatattttatgaacatcagcaggaatacgggacagatccattttgatctgttcgtcgtcaccgtctccctgtcctgttagattgtcacctgaatggataaccgaacgacatgcactttgcttgttgtggaagcaaaccaggttggagtccttcaccaacttgccttcctcattcaacatgatcgccgatgcatcacaatcgatatccgcttgtttttttcttccaaagaaacctttggcagttaccgggtcccaaccgagaccagcaatcacctcagtaagtcctgcattgcctttggttaaatcaatcttttgtcctttgaccaaattaatgcttgccactgattttcacctcccttcatatgtaaaatagctacttagagattgaattcactcgggttcagtccaagtacgatgcatatctcggcaacgactcttttctcctgatcatcaaagttgccgtcagctgaaccaatcgcactgcatacacccacaataacgcgtcctacatccggcttggctttgaatttcccaatggctttcagtgcttcctgcttcccgatctctggagagaactcaaagttcgcgacataatgattaaaacgtgtaatcacttcagccatatcaaatactttcaattcctgactcaggttgatataaccggccatcttgttcttttccgcttcatcaatggaaccatctgcaaaagcaaccagtgcacaacctgcaaccacggcatccataaaatctttatttttaaactttttgacttgctcttcaagtccttgttttgttgaatttaaccagcttttaaatgaactcatactcaacctccaatagtttcaacctgatgttccgtacatttttttcaagatttttcagtaactttcatgtctacatcatgttgaatataagttaaattattccttaactatactctgaaatacggcaattttctacattaaaaaacaattaataccttatgatacgcatcgttctggatatagtttcaagcaagatgcgagaactttctattcacttcatttttcaggcaaatattccccaatttgaagcccaaacataaaaaggctctgatcaggggatcagagcgcttatttctatcaacaccaaaattataaatttcatgaatgatttgaatccgtgaatttattccgatttttcaaaatcagcctgttgttgttcatagatttcatagaagtcgtcccagactagtacattatccttttccttgctccaccagtctttgtaccatgcttcaatctccgggcccccgccttgctcccacttctgctgtgcttccgttgcagcctgttcgactgtatatttgcttccgccaatgatggagcgggtaaagatatcgttgatcgctgttgtcacattggtcaacttcacctgaagctccttgggtagctgcggcatatgttctgaatgggtaacaccctctcctacaggaagatccgtcatgtatacctcacgcgcttccttgaatagtcgaagtccttccttctgcgatgggatctcttcgctgaacagcatttctgtgtacccgcatttgccttcctccagacggctgtacaacatggcgtaatcgcctgcccagctgatctcctgcttatatttctcctgatccgagatgcgcggacagccttgatcgttcagcgtataatgcgtgttttcaaatccatttttgaaggttcgacctgactctgttttggtcagaaaatcgatatattgcataactgcttccggatttttggctcgtgaattcacagctgcagtcatctgaaccgggttattccacaccatcgtgtgctgtcctacggacgtggttggcagagcgataacctttaatttggcttcaggaacattctgcatcagtgtatccagttccttcgctgcaaacccggtataatccgaagtcatggccgcgtacataccgattttgccattcaggaaatcctgctttgccttggccccgtccttgtcggtcaataagtccttatccaccactcctgcttcatataatgcacgtttgaatgccgtggcttctttcatgttgttgggaccaaccaccatctccccgtcctccacattcacccagttggcgttgtacatatagcggaacagacccgctgtatcgccgaactgaaatccaccgatgccgtatgtatccttagctccgtttccatcgggatcattctccgtgaatgccttggctaccgccagcatctcttcctcattggtcggtacctccagattcaacttttccaaccagtcttcccgaataaaaaagctcgttagtggaaacacctcgttcatacgtcccacttcatagagcttaccatcgcttttgatgccagccttcttgagctggggatatttctccatcaaggctttgtattccacactcgagttctcgatcaactcatccagtggcatcagctgtttttgattaaacagagtgttacggatgggcgtaccgaattcaaaaatgatatccggtgcactgccagaagcgaataatacgttaagtttcgactgagattcccagcggggaactgctgtatattttacattagccgggccattctcgttaatccacttggaccacatattatcttcgatcgtacccatgccgcttgggaccgcgccccgatcatagatcgttgacgtaatgttccccctgttgccttcgccttccgcctgttcgctacctttacctcctgtacatcccgccagcaaaccaccgatcaagcccagaacgagacccgacttcatccatgccttcatcgttaacgccatagataagaccctctttctctcctgtaatatgaacccatgcgggttaacccacagcctgctttaacctttaattgatccaagcatgacccctttaacgaagtacttctgcaagaacggatacactgccaaaatgggtatgaccatcacaatgacagctgctgcccggatgccttccggggtcagattcgatatcatcgttggatcagtaaaatcctgtacattcagattggacataatcatattttggacgagcacggtcatgttgtatttggacgtatcattgatataaatcatcacactcatgaacgaattccagtaacccacgccgtaaaagagagcaatggtcgccagcaaaggtttggataatggcaacacgattcggaacaaaagccccagttcaccacaaccatcgatgcgcgcagcctcgtccacttcccccggcagattttcaaaataagatcgcataatcagcatgttgtacgtgctcaccaggcccggtagccagagcgcgccgtaactgttcacaagaccgagattttgcacgaccaaataagtcgggatgagtccaccgttaaaaatcatcgtgaacaccatcgccattgtaaagaagcgccggtgataaaaatgtctacgtgacagcggatatgccgccataatcgtcaccgccatgctgagccctgtaccgatcaatgtgatctccacactgttccagaatgcattcagaatcggcgttcccgtaattaggctgtgataggagaaccaggtgaaatcgacgggccataaccccacttgacctgaaacaaccgctctcgcatcactaaatgacaaagcaacaatgttgagtaagggcaggatacagctgacggcaaccaatgacaacaatacataattgattagataaaagactttttctcctttggtttttctcatgctgttctccctccctaccacaaaccttcgttaaatcgacgcgcgatataattggcactaaaaatgaggataaatgcaaccagtgattcgaacaatcccatcgctgttgtcaggctgaactgtgctccctgaagaccggtgcggtagatataggtactaattacatccgctatctcattgacattggaattctgaagcatatatacctggtcgaatcccacctccatcacccgccccatcgacagaatcagcaggagaataatggtggagcgtatacccggaagggtaacatgccagatctggcgcattttgctggccccatccatctgtgcagcctcgtattgactcggatcaatggtcgttagtgccgcgagaaaaatgatggcattaaagcccatgtccttccagatccccgagccaacaaacaccgctacccacgaacccttgttgtacatgaacggataaggtgctcccgtccaggcctcgacccagcggttgacgatcccattttccaaagagaaaaccgtcatgatcatcatcgcaatgatgacccaggaaaagaagtgtggcatatagatcaccgtctgcaccgttcgcttaaaggccatgtttcgcacttcattcagcataatggccagaatgatcggaatgggaaacccgataatgatgcttaacagactgaggaacaaggtgttgcgaataatctccaccgtgcgcggatcactgaacagcgtctgaaaatgctgaaagcccacccatggactgttccacagcccatcatagaagttgtaatccttaaaggccatgactagccctccgatgggtgcataacgaaaggtcaggtagaacataatcaccggaacaaacatcaagattaacggtatattcatcttgaatcgtcgaagccgctgctgccgaatccgctgcttcatttcactgtccggcggttgtaatccagacggcggacctgcggtcagttcccccttcacatccatcactcctctctgctgttgatgtactatagttgtattttagataaaaatgtaagcgtaaacatttgttatttaacgatccttttataattttctacgcaaaaataaccccacatggtggggttgcccttggaaacaaacagatattaagaggaggcttctctttaattgtgaccctgcagcagttcgagggggatttctacccggcacttcacttggctacttgcttgcgaaattcgcggggcgatatccccgtcatctgtttgaatacggttgtaaaataactggagttatcgaacccggtcagttccgctatatctgccatgctctgccgagtgctgtgcagcagtagcttcgccttatcaattcggcgcttgctgacatattggctgaagccttgtcctgtttcttttttgaacaaatggctcaagtagttgggtgtcacatgaacatgggcagccacggcctgcaacgtgcatgtgctggaatagttcatttcaatatactgtataacacgtgtaacgacatgatcctgctgttcctgagttagccgcatcagcatatccacccactcttcgctcttgcatctggcccaagcgatgacttcaggtatggtatgaatccagagcagtggatctggggcagttgagtccataccactggattcctgaggctgaagctgttgtaccagtaagtccgtcatgaccttcataagcatatgaatctccgctttgccttgtgacaagctcatcccggacgcttcttctagcaacatctcgatccgattcattatcgatccgaattgatggtggagcagcaacaaagtcagttcctctcgcagtctctcggtacggtccacctggctgtattgttccctgatccgaatgtcggactgttttcggcgatatcgttcatgtgccttttgtaacacctggcatgcttcatcgagcgagaacggctttaacaaaaattcaattgctccatatcggatggcacgctgtgcatattcgaactctcgataacctgtcaaaatgataatcataatgtccagtccactctcgtgtatacgttcagccaaatctagaccatccatcacaggcatgttgatgtccgtaatgatcagatcaggtgtgcagctgtgtacagcctgtatcgcttcttctccatcggccgcttccccaacgacctcccacccgagggggttattgcgaaccagatgaatcagaccctgacgaaataatgcttcatcatccactacaagcatacgtccattcaacagaacctactcctttcagtcacctgaatttcccggcatgagtcctcaccgatctgataaggcaaacgaagacgtactagcgtacccgctcccacagtcgactcgatctgtacaccgtagggttcaccgtgaatcaactcaattcttcgaagtacactccgcatgccaatgtgctgacgttcctcatcggcatgtgccactggcttcataatgcgttcaatgaccgatgcgtgcatgccgcagccgttatctgaaatttcaatgatgagcagatccggctctccttcatgcccggtatgccgcgagccacgaatttccagatggcggttgttccttttgtccgagaaggcatgaacaaaaacattctccacgatgggctgaagcaacagtcggatcacctgacagcgaaacaattcagcaggaacggcaatttcaatcgacaaggcttcctgataccgggcctgctgaatctgcaggtagtgatctatttgcttcatctcatcctgcacggtcgtcagttgctgcacgggttccagcgtatactgcagcatctcggacaaggcagtgaccaggcgagccgatttctcatcaccaagcatatagaacttccagaaaaacatgctcagcgtgttatacagaaaatggggattcagctgggcctgaatagctttgagttcagcttctttttcactgagttcgcgctcgtacacttcatgtataagcgtatcaatccgggaagccattgcattgaatcgttcaccgatgaaaccgagctcatcccgtgtctcgatccgtacccgtgtatcgaactgtccatcacgcactcttttcatcgcgttgactagactcgcaagtggacgcaacagtctgccgctaattactgtaatgatgaaccaggagcataatatgctggctaccgcagagaacacagcaacttttacaatgatctttcccttgttctgaatctgagcgagtgagaccttgctgaccagggtgaagcccgctttgtctgacgtttgcttcgtatacaattgggttgttccctgctcgtccctgatctccgtcgcccctaggcttagctcggtaagtggtggtggatccgcatcctgattatgaaatgcataaagaagctcaccatctgcgtcaaacaagtagacagcaacttcctcattcagccgcagatctttgagatacgattcgaacaacgaggtgttaaacagaattaacatgacgccataggtttccagatcaacagaccgcattaatcgtcccgccagaatccaattggattgttcctcctgcaagaaggcatccggccccaaacgattccaaccatattcgccgcccgttccttccagtctatgaaccatctctgccagataggaaggatccatctgttgaaatgagccagcaaaggcgccgagattaaatatgttatccttcaggtcatatatgcggagccccatgatctccggtgcatccagccttacctgatacaactgatcatccagttcatcctctagcttcatctgatcataggacgagatgccagaggtctgtgctttgatggcattttttacggagggattcagtgtgatataatcggtgactatatacatgtcgtgtaccctggaatccagacgtgcaagaatctgctctgcggtaagactatactggcgactgacctcttcattgaacaggtcgatatggatacgataggtgatcaaccctgtgattccggagattaagaccgttgcggtagataagaataagattagcttcgttttaaatttaaagcgtttacaaaagttcatccaccacatctttcacacacctcacctatattccgtacatgtcttactcctaaaaacatatcatacacctattggaaaaaaccagaaaaaccctgaccccgcttcaagcggtagtcagagtttgaaggcatgtgatccagacatgttaccgggatgtcccagattaactctggatcacggcatttttattccccgtaaatctctttgacccgttcttcttcattggtagacaagagaacattaagcaaccccatggcattattggcatcggttctcgtcgtcttgtacatctcggcaaacgccgcttcatcctgctccgggtccatcgcagcaagcttgccccatgacgtgcgtgctttgtcgtatagcgtactcaacgtaatgtcacgcggatgctgtgcaacaggtgccatggattcaaatttcgctgtgaccctgaagaaatccatcgaatcctggaatgatgtactgctataatccttatttttcatcgcatcttcggtaatcagcagaccttcacgggcgataaacagtgttttcaccaaggcacgctccagattggttgcttcttcccaagttatataagattcatcaggtgcttgtacggttgtgaaaaatggaaaggcatcatcaattaaccgctgcgaatcggaatgaattggaacctctgcattcatgtccacaacggcatcactatagttggccacattaatatttttggaaccttcctcactaacccgacgcaccggatgatcattcaggggaatacggatataaccgagtttatccgcatactgctgcttcaactcttccaatgtggagtcctttccaatcttgccgtcgtcagctgaagaagcttcttctgtagctgaacctgtctcctcactcccattcaaaccggttgctgcggtttccgttacggtcgcatttgagctacttgtctctgacgaagcaacttctgtaccggaagcagactccggcgatgacgtctctttcgctccgccaccacaagctgtcagaatcgctgccaaaccaagcataactgtgaacgtctttatcgtataattccatttcatcgtataatcttcccctatcgtatgtatattcctgagaaccattaacctctggctccaagacttgaacacctacttacaaaaatatcctttcatataacatgcttgattcacacaattggacatggtctacattctatcataagttaaaaaccggttgtatacgacgatatacctgtgtctaaagccttttactaggcacgcattaactaccaccgcaacacaaaaacactgccgcccgtatggacaacagcattcgtgaagcgtaattatttgatacctttagccttctccatatgctctgaccgaatctgaggatcggtggaattaaccgatgataacagagcgtagatcgcctgaatatctttctcttgaaatacggtttcgggaacctcactctcaagtcgttccgtcttccgctgaatcgtttccaccaattcatgatcgtagatgatcagttcatccgaattcacatacctcacagcaggatcaacactgatgcggcaacggttggtgaaggtcaccatggagacaagacgtactcttttgtagtctccgaggtgtgcatgaatggcttccacatgtgcacgatgctgcataagtggattgtacattttgacccggctgctgctgaccgaccaattggcctctcttcttccgccgcgaatctcacctgtcgtcagatttcgagtttcgattacaaagattgcccgagggccgatcacgacatgatcaatctgcgaataaccggagcgtgacttcggattggtaacgagcaggtcgttcagcactttatattgacttggaagacctatcagctgatctgctgtactaggctcctccggctggcgtatccaatccccttccgcttttttcttgcgcttactacggaccatacgcgggggaatggttgtcgttgatggtaacgctgaagcggaggctgtaatctggttcgcaagctctggttgtgtcttgaacagagacaggattttcttgaacatgggcaagctccgttctattatagtgtgggttacgggtgaccattacaggaggaataacatcctttgacacattcattatgtaaacttctattacttatgtcggataaagcagggtaaaaataaagggaaaacgatcaaaatctctccaatacgcaaagtacatatgaacatttaaccaatttcgtgactttagacgcataaacaagccgcaaaattaaaaaaaacagcgcaaccctttcctgaatagaaaaagaatacgctgctgttctcttggttgttaagcctgaagataataggtgtagagcacctgagtacccttctcttccagcccattattcgctatttcctgatacagggattcggccagagccaacccaggcgttttcatgcccatcgcttttgcagactccagtgcaattcccatgtctttgataaaatgtttcacatagaatccaggctcataatcgcctgcgatcatgcgcggaccgagattgctgagtgaccagcttccggctgcaccggtagcaatactcttcagcacggtctccgcgtccagaccagacgtcttggcataggcaagtgcttcgcatacacccatcatgccagaggcaatggcaatctggttgcacattttggtatgctgcccggctcccgccttgccttgcaacacaatgttggtgcccatctgctcaaacagcggacgcacggcttcaaaggcctccgaactaccaccaaccataatggaaagcttggcgttctgcgctccgatatcaccgcccgacacaggtgcgtccagtgcatgcagtcctttggcttccgcagcttcaaagattcgtgcagccagtagcggactggatgttgtcatatcaatcagatatgaacccggtttggcattggctacgagaccatcctcaccgagatagatctcctctacatctttcggataccccaccattgtgatgatgacatcacacgcggcagccagtttgcctggtgtgtcatgccatacggcaccttccttcaccaatgcttccgctttggcagcagttcgcgtgtacacatgcagcggatatcccgcttgctggatgtgcccagccatgcttttacccatcacgcctgtaccaataaagccaacttttgtctctccaggtgccttcgttgtatttgtcatcgcaggtttcctccctatttctctatgcttcgctcagtgcttgtcttcgacattgctatatctgtatgttaaagctttctgcgtagtccgtccatatcgcttgcagctttctgtgaaaaaatctgaaaaaggaatcaacttcccatatgctgtacaacctaacgtaaacttccttcattggaaaggaggattcgcatgagtcgtgaaaaaggtcaaattaccatttggttgtccttttccatcattttattaagtgccggactggtctgccatgtcttgtccattccaggaattctcgaagcagcaggcagggatggatggttgtctgtcgtggcggcaggaccttttttcatgttgtttctatgtatgatgtacatcattattcgccgtgtacgtggacaacgattaacagattggattacacgagaattcggggcggtcccttcctggatcttccggatctccgcttccgttctgctgtttacgcttggcacgcatacgctgtatgaaacaaccaactggaccgtatccacgtatcttcaattcacacctccctatgttctggccggtggcggagcactggttgctgcgtgggcagcggctaaaggcatacgctccattgcgatgacttccagtctgctgctgccctttgtcattttgcttggttattttgtaatgtccgccaatatgaaatataaagactacagtctattgttcccgattatggagaacggtatgggtccagtgtggcggggcatgatctactctcttgccgggcttatggaaatctggattcttatgttgttccaacatgaagtcaaaggcaaaattcgttggtggcatgttctgatccttggcgtgtttatgctcagtatggcgatagggccaacgatcggagccatcgtggagtttggtcccgaagaagcagccaaacaacgaaacagtccctatgagcaatggaaacttgtgaatattggaaaactgttgcaacacgttgattttctatccatctatcagtggcttagtggttcctttgcaagggtcgccatatccatgtatctcattgtggatctgctgaatttccgcagaccgaagaaacgatatatcgcgattctcaccattaccgtcatcatgagcttcatggcgatgcaatggtggcgcattgattacgtggattattatgtggaccatattcagttcccggtcatgctcgcttatgtatctatcgttaccgtaatattgaccattgccgcattaatccacaaaaaggacaaggaggctcccaaacgtgccgatctcaacccaacccaagaataatcctgacgttgaaccgttccgaatgaacgagcataacctgaacaccttttttgccggatctgatgatgtcatcatcaatagtcatatgatcggagaacctccgatgcaactccttatgacctattgcagcggtatggtggatagtgaagcgatctacgatattattctcccggaactcagacgaacatatgaagatacacactttatccgtacatccgatattgaaaagtgcatcagcctggattggacccgaatggatctgcaagatccggcatttggaactgaactgatgtctctccgtgtttttgaaggccatatgttgatctgtattccttcccttcaaaccatgtggagtattgatatatctaacatccctactcggacaccggaggaatcgaccaccgaagtttcgatccgcggggcaagagatgggttcatcgaaccacttgccgtcaatgttgccttgatacgcacccgtctgcgtacgaaccaactggcctgtaatatcgaactgatcggttcacgttctgcaaccaaggtggcattgatgtatatcaaaaatatcgccaatccggagctgatcgaagacgtccaggatcggttgcgtaagattgagaccgaacgcatcttgaccgccaatgaactggaagaattgctgtcgccttcgaagattactttgtttcccgtcacccattatacgggcaggcctgactttgctgcagaatgtctcctgaatggacgttttatcctcattgtcgacggcaatcccagcgccatcattgggccagtcaatctgtttcttttgctcaaatccccggaggatgccagctttcccttcttgcctgtgaacgtaggacggatgctgcgctttcttggcctgatgatcaccgtgttcctgcccggcttttatattgcgctgacatcctttcatatggatcagatcccctttcctctagtcgcaacgatctcagttggacgcatgggacttccgatggaatcgggaatggagatgtttctcattatgctgctgatggagctgttccgtgaggcaggggtacgtttgccaagtgccatcggccagacactaactgtcgttggaggtctgattatcggagattccgccattcgagccggcatggtctctcccctcatgattgtcatcatcgcagttactgtcgtagctggagcaaccattgtgaatcaggtcatgaccagttctgtgctgatcctgcggttcctttgttttgtcctgggggcatccctcggcatctatgggttcatcctgtcgttgattatgttccttatctacctgaccgatctcaaatcatttggcattccgtatctcacgccgttaacaccccttcatttcaaacaagcgatagcttcattattcaaactgccaaaggggttaggtaaacgaagacccgtctatctcgagacccaggagccccgcaagaaagggaacgaacgatgaaacacttgttacagcgatgtttgctgggtttgttaagcctatcgatgtgcgtgatgacaagtgggtgctggagtgcctttgagattcaacaggtggactacgccaaagcctttgggattgattataaggacggcatgtatcacctgtatgtacaaacgctggattttgccagtgtcgccaaaagtgaaagttcaaccaaaagtgctgatacaccgcctgtatgggtcggacatgccgaagggaaaaccatgagtctggcgctgaacgaactgttccgtacggctcaattacacatggcttgggggcatgtgacagccatcgttatggccgaaggtgtgctgaccagcaaacatatcaaagaagtgttcgacatgctgggacggtttccagaatcccgttatacaacctgggtgtatggaacacgagcgcctctggagaaaatcctgagtgcaacgtccatctataatatgtcgccactggacagcattcttcacaatccacttcccacgtacatggaagaatcgttgtacccgcctgtgcttagctttaagctcattgcaacacataatgatcccgctaccacgacgtatctgccaagtattgcattgaacgatacccagtgggctgagaatgagaagaaacatgatttgtttctggtggaaggggccttttttgaaaagactggctatgactttgaatactttccacgcagtcagcttcccggttatcactggctaatcaaagacatgcgtcgtgctcccttgcttgtgcagaaggatggaacgatctatggggcactcagtgtaggattaccaaagatcaaaattaaacctgttattcagggtgaagacgttacgttcaacattgacgcccactacctcactgccctgtacgaatacctggtgcccacctcgtatgaagagatgatccagattagtgaagtgaagttgcgggagcagatcatgcagacctatcgtcacggccttgagcgtggtgtggatatttacggtcttcaggagaagctgtatcgcaaaaatccgaaactctggcgtaagttatccaacaatggcagcaagatgatgcttaccgaagactcgattaaagatctgaaaatccatctcaccatcccatatacagggaaatataaaaggaaagtgtaggaaacgcgtaaaacaccccttgtccggtatggaacgacggataaggggtgtttgtgtatatgaatgtcgctcgtttgcagttcggatcatgcagatctatgacagcgaagtttccattccattaacttttacttcttataataatgcatcacccgcaaccgagtagtcaggattaaggtctgaggaatgagcacaaaaacaatatacataagtacaattaaccatagatgtgcggcaaaattctccgcaccaaacgatggtttcggacgctcaatccaataccaccaacacgggatggcaataaaccatgtcaatcctgtcgaaacgaacatgtcttttacatcgctccatagaaagcagaacaccgcgacgaacaaaataggacctatccaagaatccaatatcggtccccagctctggaagacaaagataatggcgggatacagaagatttatggtccagcgccatatgttattagtataaagattcataaagcttctcacctcattacataacgttgcaattgtaacttcacttattggggtcatttgctacattactatcactttgattatccgtagccaaaagtatgtacgctccatttttaaaggttattatgggaaagaaatgaaaagatgaagcatgatattggatattattgctcatactaccttcaggaaattattgaaggagtgacagcatgaggttaaaaagtatcatcgccgttggagccgtgttaacctgctcaactctgttatggggctgtggcaatggcactgcgaataatgcttcccagcaacagaatgacaccgttcgatcggagagttggagcgatcccaaacgactggaagcttcccatcttgaagcgcttgagcgcatggagaaagatcacatccaccgaatggtttcgcttagcgcaagtacagatggagacaaagtgatgaccacacttgaacggtcgagtcaaaagttggaggaaatgagaccgctcgccgaaatgctccaacatgaaggacatccggcattattacagcgaatccaggacatgtccggcgatatccaaggttccaaatccgtcattgctgagatgaaaaatctgcctcaggacggcaaaattaaaattcagtccgagaattccgattccttgcatcacatcagcagcttccgcgattaccaccagtatatccagggacaagtgcaatctttagacggtaagtctacgcaaatgtcccactaaccctaaagatagttcagagaatcgttacagtcggaatacgataatccgatggttaacggttcttttttattaacttcataatgtacactcttctctacagcttcattccacccacaacgatacccagatgaacatgctaaacagcaagactggtgcaagtgcgcctgtggctaatatgatccaaagtgtcgcgggcttgatcttttgacagtatgcatcgaccttgcgcatccgatctttacgccacttggcaaacttgagccgtctgatcatttgattcagaactatttgccgctgctcgccctcttcgaattcatcgatcgcatgccgcaactcctcgtataattgagcctcttcctgcccagccactgtaggtgtactcatctaacccttcctctcataagaacattattgagatatagccactacttaaataacacattacagaccttcaaggtttgaagttttaaaaaaaaatggacaatccaaaaagcccgggcatagcccagacttcgtagaatcatgttagaactatttaactgagtgctatttagctcgcgttagcgatcaatgcattcaagcataccgcaccctgtgcacgcacattaacgacgataatcggcgtatccaacatgtcgtgcatccatgacatatactcttctactttttcgtttggaaggatcgtcagaataacccctgcgaatccaccaccatgaatacgacaagcgccatcacccaggttttgcagataattctcggtcagtgccagcgcgatgccaatctcctgttccttcacagcaccactctgatatacattctgcagccacttccatgatgagttcccggacgccgtaatcagtttcaagaaatcagcaaaacgtccatcacgcaacgcctgaacctgaccatcgacacgattattttcctccaggaaatgaagtgcacgcagcacggcacgatccccagcagcttcacgaaccttcttgaggttggcgtagattgcgtcagctgtaatttcccgaacatactcactgccgagcgcctgagcaaccgctctcatctcatatggcacagcagcgtaatcttccgtcagatcggcgtggttaccgcccgtattcacaatgaccaatgagtagccgttttgttggaaatcccactgaacaggctcgatgaccggctgtgcaggattttcaaaatcaatagcaatgagtccgccgtacgcacaagccatctgatccagcagacccgaaggtttgttccaatagtgattctccgcatactgaccgattttggccaaggtcacaacatccagtgctccatcgttatagaaatgattcaaaatcgtacagatcagcatctcaaatgacgccgaggaactcaccccagatgctgagaacacattacttgagaggtacgcctggaagccgcctaccttatatccgaattctccaaatcctgcagccataccgcgaatcaatgctgttgtgccatcgtcttccgtatttggtttaagattcgtgagatcgattacatatttcttgtcatagccttctgagtaaaacgtaataacggaatccgcagttggtgcagccactgcaatcgtatccagcgtaatgctgcccgccagcactttaccatggttatgatccgtatgattgccgccaatctcgctgcgtcctgatgcgctgaacaacttgcttccttcttgtgcgccaaagtactcttcaaacgttgcgttcagcttcgtgtaacgtgcgatctgttcctctacttgtgattgtccatacatttgggcaagcaacgcttggccctccgtggattggatcagattcaatggttgtgtcgtcattaataatcctcctatggatatgcagcttttatttttagactgttggtaaacatggttgtcgcgtctgtttcataccttattcctctcccattatctcagcttcgtagcggaaaaggtagggtagaattgaaagtttgtaagcgttttgtgaagttatttaatgtaaaaataggattgaaaaccattttgtaataacttaaatttggtataagtgaaaacacattattttccaacctcggagttgctatgcttaacatcttattggtggagggaacgatgaaaatcaagtcaaactataccaagttattcggtgcattttcgcttacatttttgggtgatggacttacactggctgcggttccttggctcatatcaacccttacaagcgatacgctgtatgcttctgtcaccatgacggcacttcgtttaccctggctactattcagtcttcctgtaggtgtcctcatcgaccgttactcacgcaaacatatgctgattggcgcaggttttactcgaatgctccttctgcttggactgacgttatgcatctggggaggatgggtgagcattccgattctggctctgttcatgtttggtattggcctgagccgagttgtattcgacagcacggtgcagacggtcatccctcaactggtagatgagagtaaattggaaaaagcgaatgggcagttcaccgccggacagttaatcacaagtgatattctgggcgttgccctgggagggttcattatcaccctgcatattgtttttccttttgccatagacgccgtaacggctgtagttgctctgctttttttaatcagtttgaagggaaacttctacccaggggatacggaaacaaccaagaaggaagttcgcccgatgaaaaattggaaacgtgagatgtggtccggtattcaatatgtctatcatgatcgttttctccgcggattagccattctatctgtcaccattacgctgatgtattcgattatcttggctactcagatcttttttgtacgagatgtgcttcagttggatgcttttgcattcggtattctcatctccattgcaacaatcggcagcattgtagggagccaggctgttgcatatatgcgtaagaaatggagtacaaaacaattgattatttcctccattctgtgcatgggaatcatctacggtgtggtgggtcttactacaaatgcatatatggtaggcggcctgtatttctgtgctgcatttttcattattgtctacaatgttacccgttcctccatcctgcaacgttccgttcctaatgagatgcttggccgggtcggaagtgtgtttcgctttttgtcctttgggatcagtgccattggtacgcttctcggcggattattggtgcgggttagtgaaacgacatttgatcgcgtattctcgctgcaactcccttacctcttgttaagcctgatctatatcctgtctggtctggtgttcactatgaagatgaagaaccgttcagagagccagcagcgtaacttcaacgcttgactgttacgttaggtcatacttgataatgatctcaagcttacatgaaggagagattaaagatgaagattaccgcgttacgttcagatcaaatctatgaggagatcatccaggctgcacccgataagaaattggagttataccgcgatcttatgatgagtccattcatgaacaaatggaacattcaacagatcccgtttcgatcaagcgaccctaatggcttcgatgtgatcatgatgaataactttatgaatatcgctccagcagatattacacctgaaattaacgaatcgttagcagcgatttcgtctgaagcattttggcaacagtgtcatgaagctgtccgtaggagtctatctacctttacagatcacgggattgagctatcggtccccgaatatctatacacgattttattaggcgataagaacagtccttcactcaccatgaacgaaggtatcagcggagatggtggaatccccggttatattattgcgaacctgatccccaatgggtatactctacctcgtatgcaatccgtgttagcccatgaatgcaatcataacgtgagatatcaatatatccagtggagtccgcagattacgcttggcgagatggttgttagcgaggggctggccgagagctttgccacatccctgtatggagaagaattgttaggcccctgggtagccaagacggatatggaaacattgaataaagttatcaaaccaaagatgaaagaccagctgcatgtcaccggttttgaccagattaatccgtatctatacggcgatgaacttgccattatgcaaaatttcacgcccgtgggtatgccctatgcagctggctatgcctgcggttatcacttgattcaatattatctcaacaaaacaggtacaccgattaccgaagcgaccatcactccggcaagtgtcatccttgcggaaacaaaggaattttggaatgaagacaccttatttcaccgttaaagatatcattcagatcactggcatcaccaaacgcgcattacattattacgataaaacggatctattgaaaccgagcaaagtcgaggacaatggctatcggtattatgatcaagaggcactggggaatctgcaaatgattctgttgttcaaagaaatgaatttctcattgaaagacattacagccatggtgcaactttccaaagaagaacagaaagatatcctgagagagcatcgcagtacactcgttcaacgcaaacaaaagcttgaaaccatcatcgaccagttggacgagtatgtggatgggacggatatctctcatcttcatctgtttgacgactcttccatcctttccattcaagaacaatatgaatccgaggcgaagtttgtatatggaaataccgagaagtatcaggaatttgaagcaaatgtgagcgagctgtctgcggaagagcaagaaaaagcctaccagcagttctcggtcaacatggagcaggtttttcgggatttggcgaagcatcaggatctgtcccctgcttctggtgaggtgcaagcgttagtgcgtgaatggaagagttgcttggaacaatttatgagctgtgatgatgagattctgagatgtatcgcggaagcctatacgacagatcgtcgctatgtgggttatttcgatcagtttggcgatgaggactttttgaggtttttgtatcaagcgattatggtttatgtggagggtggggaggtatcaggtgtgaaagattttaggtgacctccaaaagaacgcactgaaaaaacacggaacaatggtaatatcaattaaacgccccattatgtaaatgatcaatctaataaacccatggctagagcaccttagccatgggtttattagattgatattttaatttcgagaaatgtttttatctgaactcaccggctaaatcaactccgtcaaatgtagcctttggataataataaacaaacataggtaggcctgtgaatgaatcagacttatttaaggtaaggaaatccactttgccggacgatgtctggcttactgtattgttatagatcttacctattgctccagtttcaaaatttacaatacctacacaatcaattttaacttctgctcggatgtttctttttatgccagctgtgtcccatgcgtccatatagaaattccaactatttttaccgaatccgttatcgtattctacataaccagttaaagctaatgttttattgttacctgtgaaaaatttctttgagaccgaaaagactgatacgtcccctttattttgaatatatgttatattattgtttaaagctgagttttcttttaaatattgtgtatcttcgtcagaaaatggttcgttaacttcatacttatctagtatattttgtatttttaaggctgtatcatcctcacctgtacttgcgtgggctgaattagtaaaaagaacggaaatggatattgaaaccaagaataatgtcaataacatactgatcttcttcactttaaatacctcctaaaaattattatgaaaggggtttcgacaatgcacattgtgtggaataatatacttattctcgttgttagccttcttatcttagctggactagtttctggcacaatctactttttaataaaaaatagatctaaatagttcacctccttatgacgataccacttccatatattatatattattcaataaattataataaaaccctcttttaatattaataatgtctaatcttttttaagttgatatatttgttgttcgatctctctgcaattattagacagttccccctattcgaataatataagtgaactacaaaaagttaatttcaagtaagcaaaaagcgtaccactactccattggtacgctttttgctttctcttcttggtaaatttttatttgccaagtaaaatttcaatttgactgactgtataagaacttcttctcgctacttatcaataacttcctcgctcaaaatacgtatgcagccgatacagacatatttcccgtgtccagcgatataacactgcctgttcctccctatcatgcacttttacattcagcgagaacacgccattctcgaaacgggtcatactactcttcgccccgctccacttggacattggcatgtcgataatcaacttttcaatctccgttgccgtcttctcattccattcccatagcgcaagtttgcctttgtccgaaaagtctttccgtttccgatattccttctccgtcaggtacgtatggaaaaaactcgccatctcccccggcgtgatcgggtccatccagtgcgcttcgcctcgctccagcatgtacagcagcacgatcattttgtagcttttgttcatgagtgtcttctccacatcacgcagccacgcctcatgccggacgtacacctctccctcagcaggggacagcagctccgcccaatagagaaatccaacataggaaccaaaatcgcttcgatatccgatactcttcgaacgccccatcagatgcaactccagataagtcggaatacgccccagctctcgcttcacatccaaaaaatcctgatgcagcttctcgcggcgcggcagccgtttgcggcttagctcctgaagcagattcaccactcgggtctccagatgaatcccgcagttgtctggaacttccggtacagccgaatcccggtctttcgcggttccctccagctccccgcgcacatccagcagactcaactttacatccgcattgcggtaattcccgatcaggtcaatgatgacgcaatgtgatttgccttccgccagccgcaaaccgcgacctacctgctgagtgaacaccgtaagcgactccgttggacgcacaaagagtagcgtgtctacactcggaatatccgtaccttcattgaacaggtccaccgttaacacaacctccaactcacccgcatcaagctgccgaatcgcttcctcccgcgacatttccgatgttcgcgaatgaagactgagcaccttcaccccctgactgcgaaaatacgcagccaaataatccgcctgacggatcgacgagcaaaaaccaatcgttctcgtctgcttgtgtcggacccaggctgcatagatcgtctctacatgctcctcttgcaattgaacggccatgagctgttcttcatcatactttgtcccgatccagcgaatctgcgaatagtccgtatcgtcgaataccccgtaatattgaaatggcgccagccaacctcgccggatcgcttcaataaaatgcatctggtaagccacattcccatcacagagcgcatacacatccttgccatccagccgatccggggtagccgtaatgcccagaaggaacttaggctgaaaatgctcaatcactgacatgtacgtcttcgccgccgcatgatgaaactcatccaccacaatcagatcaaaggcatccaccgcaaatccatcccggtgcttctgcatactcagcgtaaagatcgaagcatacacacaatccgccgccccatccttgtactgtccgttatagatcccatgactgcgctccggcatgatccgctgaaaagacttcttcgcctggaacaaaatctcttcccggtgcgccacaaacagcacccgctggaaccgctgggcgaagaaacccgccagatacgttttgccaagcccggtcgccatgacgaccatcgctttgtcgtactgctcctccatcgtgccctggagtgcttcaagcgcatccaactgcgccaaacgcggctgaatcggggcaagcgacagctcggcggcttcttcctctttgtcctcaggtagccccgtctcgaactctgcttcttccatctccatgatccgctggatcatctccgggttcttctggtgatatttgcggtactcttcctcatacagcgcaatcgaatccgggttcactggcaaggttgtctcgtggtagaagctctgcatgaatttgtccaaagccatctggaacgtatacggctccgcttccgcattcatcgccagattccattcataccccgtcttgagcgccgtgaacgaaaagttagacgagccgacaatcagcagtccttccccgttgtcatgatcgaacagatacgctttcgggtgaaaagaagtgcccatacttcgccacagccgtgtctcaattcggggatgaacctcacacagcgcccgcaatccttctggctgtgttatgtacagataatctcccgcgagcatccgcacctcggtcccacgctccgccgcccgctttaagtgcggggccagcagcttcacaccagactgcataataaaggacgtcataatataaatcccggatgcatgttgcatccgggcaatcagttcgtctgccaagttatctgtaatgagtttaacgttaagcttcgtcgacatcgatcagatacacccgttcctggaatccaccacgctcctcggctttgtctgctcgaagcttatccaactgggccgcattcgccccgtgtacctccgccaacgcccggatgacctccagcatgtcggctagttcttctagggcttcctgatcactcgctgcatttacgtactcatccgattcttcttgcaacttcgttcttaattcttgcttatactcctccgggtccagaatgcgtgtgcggcattccttaccgctggatgtgataatatgcgggatcttgtcccgcaccaatttgttgtatgtaggcatgtggtataacatcctttctgctgtgagagccttcgagcctcgcgctagaatctccctttttgccattataccatttgccgtggtaagggaaggattgattttgtagtgcagtagattcgattgaggagatgagaataacccatgactactcgtattcgagttgaaatgggctttctgccaattaaagtctaattgttctgcatcaaactctggttaagaaggattctaagccaacagttttgcgataatagcattaatattcgttgtttctttatcaatctcgaccaagcaagtgtcatcatccatagctggttcataaccgattctaaccttctcaattgcatacttgttcttaatatcaagaatatactctattaacttctgagcttttaacgttgtctctgaattttctccgctgaacaattcctcttcaggaaagttaattacaatatctccaaattcctcatcaaatgagaatacaatcatcacgtcgttaaaggtatgaccccggttaagctgagacaacaatacatttcccgttcccttaggagaaagaatctcttcaaggctctctatttgctgaaattcaatatcgttttcactacggttatcataaaagtgagaacttttgatctgatccgcctgaatgttcaaatcattcttaatgaatcgatccagattatttttgttaaaatcaattaaaatgatttctaaactttgcacaatacagaccctcttacatcaggtaattcttcatatcacattaattcggtattgtaggcgcatgtagttgcttatgttccaacccaaaccattgctcaatatgattacataacaatggaatgtcttgaatggcttgctcacagatttctttatatgaatcttgaagcacttcctcaagttccaaattcacttgatatgcctcagtttgtttagcatggtgcacatccgctggctcaatgacataattttgatttttggttaaaggacttacatagatcatccactcaaggtttcccttaaagtgctgaatacaatgctttaattcctcgtaaagctgatcagcgttatggaatctaaaataaaaacccgcaggtttctcatatatccgattcggattatacatctctgttctattccattcatacgaacctaatttggccaaggtatacgccataagttccggcataagcacctcttctttacttttcatgtaaatactttttgacactttatccacctcatttgagagtacgtttacttactacaatatcaccattgttctgtctactcactgtatccatgtattcctttacaggaacgggatcactagtcagacgaggatcatatatatatttgccatcagaatatacagtatggtaaacgtatgatttcatctccccatactctttaacttggatatcctttaattctgtcctcgatttaatcgtgaaaatctcgcctctcccacctgccgcatgagctaaatcatctgcaatttccgaacaatcgtacgctagctcttttttgtaaaatttcgacttcgattccatcgtatttagaaccgccgaattccctattacagtagtcgattccttggttaatttagttccatgttcaggcgtgggacttttattagaagaagtcctctctctcacaccatctaacctagattttgatagaactgatccatctttcggaaccttataacccctattatacgttcctgtaaaagccaacacgagcttagcagtctgtaaacctccaatagaaactgctgcttgccatgcaggtatggattctccagttacgggatgatgaccttccttaaatgcgctgatctgttcatcatatatatctcccccactagacaccggttgcttaggcccagccctcatttcctcataggtaccaccctgttcccaatacttaacaaactccttttgccctggcatcccatcctctgcttcactggcaggcatgttaactccaaacaaagggttatataccattcgtcgttgttcttctgtgttacttatattatggttcatcattgtatggacagcaatctgtccagcaacggctcccaagctcacctgttcctgatctgcttgttcgaatctctcagcaatcgcgaacagatcttgggatgacttaaccatactttccagtgctcgatcaagtactgaacgtgactgctgaaaatcatagaaaaatcgttcttgtgttgctcccgcccactgagactggatgaatccgatccgtgcggtcaggtcattacgtataccctccaactgctgcctaccctgctcgatctgtctggatacatacaacagttgctctggtgtcactttaattgtactcatatcattctccgcgtttgaaataggattttaccatgttagcagaagcttgatgtatatacatccttctaacatcctaatctttcctttctcaccataacaatatttccaacaacgtacttcgtaggtcttaattcaaaggaaatcttcttaatctcttgatttaacagaaaataattaacaaacacaccaacgggcacgccgttaacaatgccgctgtaaaactgatctgtgccgcgactcgtcctccggtaaactcttgccgtgaaaagaacatccagatcgagaggtacgtagcgcctagtgggaatgaaattatccctctaaacgtactcggttccatgtatccagtcatcatgcttttaccaattaggattagagtaaccaattccaatatagataatatgaaaaacacgatagcaatcactcttttcaaaatgtacacctactttctagacgcaaagcaaagagcatcctttgtattctctgcatcatatatcctttatttggatgatgtcatcttgtaagcgtaacatagataaatcaaacatttaacccaaatgatcaattaaaaaaacatcttactctgatgaatccttcatcaaacgtgcagatagatcatccaatatctcttccgttcgttgaataagactttcgatgttgtttagttttagtggttgatcgtgtggacaatcctccaaagatgacatatgttgcatcgtgccgatgaacaatgcaatatccaatccgagttcagtgtccgtatgcactaaaggcaagatttcattcatggtgagttctttggggggatgaactgaatgatacttatggatataaagcgccttaatcatggaagctagagcccaatcacatagaattaggcaggctttaaactgattgtgattacacatgatggcggaaagtttgagatgatacttagcatgttggtggtaggccattattgtggtacgtagcatgtggtaagcaggagtatgtttggaactaggttgtgtggagatatcatggtcttgcaaacgtggggtaaaatctacttggtgattacaatgtgctacggttatggaccaatttcttgccattgtcatccctccaaagagttaataccagtattatacaataaaatgatacatatagtaatcaattagattatttgtattcttcgtttggtgtttaccttgaggaaacttgtctacacttttgaacatagagaggtgaataccatgaacgaggacagagaagttctgaagctggtcggagccagaattcgcgcactacgcaaagaaagagggtattcacaggaatccctcggagaaaaaggtggatttcatttttcatacataggacagatcgaacgtggagaaaagaatgtttctttggtaaacctcgcaaagatcgctgaatctttggatgttaatttgattcaattatttgcttatatagaagaagagtttgaagtaactgaagatgagaaacaaatcaaagaaattgtacaactgctaagagattcttctcctgataatattcgagtagccaaaaatgttattaaaggaatattgatgtgaaagcacgaaccctatccgtccatttatggacggatagggtttctctctactttgcacagtccatggtacacatcattttgaatttgctctgctacataaataattcatcaattcttgatcccgacagtaaacataacaacctttcataccccgagacatcaaaattttataaatatttttgataagttttgttagttcctcattcttaaatttaagccctcgttttcccattctatctttgtactcatcataatctgaataaagttccattttctccgaatcgaatttaagatcattccctataattacgcctacataatcaaattcaagaccttgagatgtatgaacgcacccgatctgatctataccactctcatgaattgcccaggtgcttgatatagaacgtgcattccaaggcatagcaaaacgatgttcttcaatagtgacatccggaatttccccattgcgattaccttctttatcagctgtccaattccaagcaaatcctgctaacatcctcgccttatatccctgatcgtttttacttttgattagatcgtatacttcgttaggcgtatctactaatttgaattcaaaagaatcttgatcccaaccatcgaaattagcggtgggacgaatctgtaaagcatcatcaacccaattcaaaaatccttctgctccagaacaacggaactgtgctgctagtgaatattcatgcacttccgaatcatatagggcagctaaacgtttaatctcgtctatagaacctatatcttcaggacgaatacgttgaaagtcatctatgaaaaacacattcactttagatgcttttatgatatcctcgatctgattctccccaagatattgatatgctcctttaccttttaaacgatgcgcctcatccactacaagtacgtcgaacatatcagctggctctttgtaaaactgacttgatcccgtaaataacatctttgtcctagttttgtttctagcttgtcgctgagtcaaggtctctaccataaccgtccggaatgaagcattcggggcaatgaatttaacattcaacttatttttaagtaatccaccaagggcattcatagatatcactgatttacctgttccaggcccaccttgcacaatgattgtgcgttttacatctgtttgcttggcaaggctcataatggcctcgtatgcaaccttctgctcatcaagtaaaacaaaatcagagttcccttgaaataatccatcgatatgatcgattagcttcttggaaggacgaatcttaccgttctcaattaaataaagtaaattaactccatttccttcacctacatgccttttcagaaaatcttgaagtttagatgcatcatcagctagaaacaaaggagcttcacggatgatatcctgatattgattatattggagagggtcaggctgaacttttctgtaattatgtagatatgcacatgagtatccgttaatatctttagagtatacagcctcattcatatcactcaaatattgtttgtatgaccaagcttgatacgaaggatgcggtgtctctcttgtcctacctcctataaaagcccttactacatcttctcgatccatagcctctactgaatcccattgttttaactcaacgatcacaaagttatcattcttctgttcatcctgacctgcaatgataaaatctatccgcttacttgtagaaggaatattatattcaatcaatattccgcagtcatctgctaccttcgaattacggataattttctccataaactgcatagagttgttccaagctcgtacttccccttgattaggtctttttcccatgcctttaatgaatgcttcttcaatctgaactgtaatttggttgttatcaactgattcccggaaagctaatgcgttactgctgtagataatcatgatgcgccgcctgtaattgaattaattcatctgatttttatatgtgataatctattgattcttctccgtttctcaataatcttaaaaaataaattttttcagagagtatctctgatcgttgttttgtgcggaatactgtcgcttcctcaatatgtaactcattaccaagtaaaaaatactcattatcaataggataatagatataccattttatattgtccttagccttaatgtaaaaacactcctcagagtatttattgtatttcttcaatagttgcgttgctgtctgaattgtcaaagcaacaaaacaaatattcacgaaggtaatggttaaaagaatagctataatagaacctaacaactgttcaattatattaaagtttatagataattgactttctaaaattgtcgcaactaaaaaaccaggtataaatgagaacaaacatccaatatgaaaaataaagattatggataccacaataaatttattggcttttggaagtaatctatcaaaaacatctatcttaaaataagatacataaattagaacaacataactagtaatagttccccatagaatatagtagacaatggacgaactaattttaatttcgtaaaagaaaataattataaggcaactacacaaaacagaaaaaataaaattcatgaaaaatttaaacattctaacatataacttcttttctttagtgaagaataattgctcgattttagtagacgttacagtagttattatttgattttttcttataaaagcaactaaagttccaatgaaaacaattatactgcccagaccactaatttttgatattattgaccattccgcaatttgactccacactttcttacagctccattccaacttataatataacttatattttcaaataatcttcaaacaatacacttattcgccaccgccaccatcttcgcaggcatctcttcccgcagtcgccatacaaagctcatcggtttgttcccctcatgactcacataatctgcttcgcccaggaaaacaaatggagaggtatagttatgctcctccttatactcccgcacgaacagcacgatccggtggcctgtctggcggtgatgaatataccgctgcgcggtagctgtatgctccgacaccctgctctgtgtctgccagtggaatagacgctcgttaatcgcataatcctcgtacaatgtggagggtgagaaatctttgtccgatttgttcaacgtaatgaagaaaatatcggtctgttcatctgcaaaatacttcacgccttcacggaaggcaggtgattgctgggcattccagtaaccgaaggcggcaagtacttggtcaatagagtacagacagtggatatccagtggacaagtgtacgggaacgaattgcttttatccacaaatcgcagatgagccagattatatttaaaaatatccacaagttctgctcggtatgcttcacaagacagcacacgctgcacaccctcttcgatgctggtcagtcctagcttctcgggcgcagctcgatggaaggtgtaatagaacataatcaacatgcgccgttcatcggcggtggttgcttctttgcctttttcaataaagtcgatcaggaacgtcagccagcttcgggagttaatcgtaagcacagacggcagtctgcggatgtactcctcgtattcatcttcgatgggtgctgttaatccggcttcggccaacatgccgcggaaataccttttgcccgtacgtccaccatacaattcaactagtgtcatcccgtgatgttcaacaaaatgagccaaggtcagcggtagtccggtgtcttgctggaacgtttgcagcttctggatcaacgctctgcgattacgactcatctgcttgaggttgcgcatgacgtattccttcgcttgtttttccaattgaatgaacgtgccgcgaggcaggttcgaaaagccgttctcgacgtagtacgagatggaatgtttggtagcgccaatcagggcgcggaatttatcctggaacctgtactcctgatgcgcttgcccgatgaagtcgagcacggtcaggcactctttaccatccgccatccgtagtccacgtcccaactgttgcaggaatacggtcagactctcggtaggacgcaggaacaggatggtgttcacctcagggatatccacgccctcattgtacagatcaacgacaaagatcatgcgcagttccccgttcaccagctgtcctttcgcagaatgacgttcctgttcgctcgacccgccatgcagggccatggatggaatgccggcttcgttaaatatttttgccatatacattgcatgatccacccctacgcagaaaccaagccccttcacatcgtccagatcggttacgtatttgttcagactttggatgatctggttggcacggattttgttatgagtgtagagcttctccagttcgttcagatcgtagcctttacgcgaccacttcacctgagatagatcgacagtatcggtgacgccaaaatattgaaaagggctcaggagcttgcggtcaattgcatcggttagacggatctcggcggcaatcgtatgatcgaagtaggcggtaatgtctttgccatccatccgttcaggcgtcgcggtgagtcccagcaaaatcttcggttcgtaatgggacaacagcttctggtatgaaggtgcagccgcatgatggaattcatccacaatgatgtaatcgtaatagtctgggctagtgatctccgtcagcttcatggagttaagactctgaatactaacaaacaagtgatccagcgcctctgctcggtaattcccgacatgcagctcaccaaagttcatatccttcaggatataccggaacgtgtcccgactttgcttcaagatttcttcccgatgggcaacaaaaagcagctttgctcccgtatggcttgcccggaatcgcttgtagtcgaaggcagagatgaccgttttgccaacgcctgtggcggcgacgatcaggttgcgggttcgtccatacaacgtacgctcggcgttcagctgttccagcacttctttttggtaatcgtaaggctggatgtcgaggtgaaagtggttggactgatcttttttacgattcagagccgccttcaactgtgcctcatgcccttcatcctcagctacatatcgcgtgaattcacggtcattccagtaactctcgaaggtcgcttcaatcttgcgcagcacatcgagtgaatctttctccgtcaccttgaggttccactccataccactggtcagcgctgggttggataggttagaggagccgacataggctgttgtgaacccggtatcgcggtggaaaatatacgttttggcgtgcagccgggtcactttggtatcatacgaaatctggatctctgtgttaggtaatttgctgagttcagtgatggcctttaggtcggttgcctccatataggtggtcgtgatgatccgcagcttcccgccactagccgtgaactgttgaagctgttccagcagcaggcgaagtccgctgaatttgataaatgacaccaaccagtcgatccgatcggctgtcacgatctccttttgcaactccaataacatactcggctcggactttgcacctgtgaataaagaactttgggagatgggcgtatctggacgaacgattttggtatcccggactgcacgaatgctgttcagcttggaatacacatgggtcaacacttccccctgctcatccagttgcaattcattgtactcttcttcccccagcgtacctttcaaggtagcaataatctcattacacgttcgaatctgcgccaatactgccgttttatcttccgtctgttcccgcacaatcttgagcgctcgccgggttaccgccgccaaatacgtggacagcagcttgcgcgcttcctctgcattcaacttctcggtcccaatgttatacacatccgggtccagcgccgaaatctcctgtctggtgatggtgttgataagctgttcatatatgccttgtttcatgaatgtacctcgcgagagttaggatttgtggatagttctctatgtatatgttagctgaaagttgcttcttctatattatcgaccaatctgtggaagatttcattagttgtttgatttcataggaaaaagcacctttacctgtggtctggtagaagtgcttaatgatatgactttaaatcgtgcatagatgtgcgcaactcatatcatcttttcactgtatcacttagaattataagttagtatgacagtcttctctcttaaattgaaaataaggttatcatcttatctttaataaagattgataagtaatcgcttgttttttgagtttgaatatcagcacaaaggctagttatctccttttgaagtaccaaaagcgcggctggaataacaaaaatgttcattttctttatattcagaccctcatcatcagtttcaatctcaattctctttatatcgtcatcagcacgcaaaatatcacctagacaatagacaatcttgtcttctctagcctccttaaccactttttctcctaataaccctaagagaacttgataattcgggtctccgtctttaaatatattaattaactcaatgattaggtcattcagagaaatatttcttaatttctcttccatcctctctcttgaatcatctagaaaccacgattcgaggtccactggtgtatcgtctattatcccgggaacatagggcttagtgtaaagaaaatctttattcattgtttaacctaccttttaatgttttttatattccccacctatttttttagcaactctgtcaaatagcatatcccacactgcatctttattaccagttttgaaatattcttgtgcttttagatcacttcttagctctttttgaatattagcgaatataattcctatgtcttctgcattttctttccaaccttctgcccctcgtttcatactcaaattagtaccatttggagaaacagctcttatctcagccatattaaaatctattgcagtggctatatcttcaagactgaaaggcccgttagttggatggttatgagtaaataccgtatctttagctacatctttatggttacttatatttatagacttttcagtaccaacaaccgtttctcctattaaattaccattcttatcaaaaaattgcccgtgttccaagggtttatttcgaatttgatcctcaaacttattaacagattctaaataatgagttctacccgtcctgtcgtttcctttctccttattcgactcaggcttgcctccgcccgacccaatgtcgtcctttgaacgaaatgctttgccaaacaaaacatacgccagggcctgtcccgtcatcgccccaccgtaataccctgcaccattctcatcgatctgcttcttctgttcttctacaaattgctctatatctgacctcgccgttcccgtaccccaagcggtatcccatgcaaactgaatgccacgcccaacgtctacaactttgcccactgtcatggcatatgccacactgcttaatgtactgaacgggttatcgaagagagcttctgccgtctggcccattcccgttactgtttctcctactgatttatcaagcagccctacagcgaaatttcgctttagttcttctggaatgtacagtgcaacctcacctgagccgtctgttgttctgaagttcattgctataaacgtaaactctttctggatttcgtccaacagtccgagtgtagtcgggaacacttctttcacctgcataaaatcccaaaagaatcgctctcctgtcacaccagaccaatcggactgcaacatatagatcgatttttccagttcccagaccattcgctccagttcctgtttcttctgttggaccaaccgggccttttcctctaatagatcgggatgtacctcgattcgctgcatttccttatcacccgccaacctgaccttagtttatgtacctaaattttaacaagtgggaaggaagattggaatcaaacggaaggatcatttcctcagaggttatccggtagttgggcaacatccttgggtaactatttttgcacattaatgcatggatgaatgccgttgagtcgactgggtatcttgtacaaaaagaacgacttctattacagatagaagtcgcacaagataacaatacagcatgattaaatcttctttaagacactacaaattgtacgacaattggagtcccatcatttaatgcatctcctccgggaattgtaattgtagtcgtcgtagccgaggatgtatctgctgtttgcataaggccattaatataaagattgtagtagttgtaggtgcctggaaatgcggttgcagctacaccagcgtcgtttgtaaaagcagtcgcagcaatggcaaacgttgccccagtgccggtcccatcaccaatggttgcaacaaatcttaaactgttctgaaatggtgtcacaagtggcatgtttctcacctcctacctaacatagtatatgtggtaggtttgggagtagtgaaggcaaaggaaccagcaactaaatccaattttaaccatttataatattggctgttattataattatctcgatagtgataggtgtccctgcaaagatcacaccgttttgtgacgaaaaaaacaacctctctgcacttacactgtatgagtttcctggttggacaatcccgtttatataaagattgttgaaactagtaagtccaaccccggcaaattcggttatgctgtcgccatcgtcatttgtgaattctgtggcaggaattacaaccgatgccgacaaatccagatcggtgtccggaaaatagaagtaacggtttgccgtaggaatgatttcaattccgggtacggtgcccggcggaccttgctcgcctgggggacccgttggtccttggactccgggagttcccggttgacctggctcaccctgaggacctgcgggaccctgcgctccgggaagtcctgcttgacccggttcaccttgaggccctgcgggaccttgcgccccgggaactccgggttgacccgattcaccttgagggcctgcggggccttgcgctccgggaactccccgttgacccgattcaccctgaggacctgccgggccttgcgctccccgaactcccggttgacccagcccgccgtgaggaccaacaggaccctgcgctccgggaacccccgattgacccagctcaccctgagggcctgcaggaccctgcgctccgggaagccccacttgacccggttcaccctgaggaccaaccgggccttgcgctccgggaacccccgtttgacccggctcgccgtgagatccggcggggccttggacacctgccacaccttgcgttccagggagactcacagtccccaattcatgttgtctcaacggagcgagcagggggccgggctcacaacataccgggttgctgcctccccctctcggtaatgcaatgacttttttgtcacgggccattttctgtgatcttaatggacgcttcggtgagcagcgctttttccgataagacctacggataatatggcatctctttcgttttcccaagtgtttgtttctgcatttcgacgtagaacgactgggccttaatttgttgagggtggctgtcctcttgttcagatacttcaaaatggtcatctccttaggccaaggcacacagtatatatgccctatactatgtccttagcacattcggagagtgtgcgaataactatgagggaagcccaataaaaaagacaagagtcctgctatagttgtcctttgccttgccagcacggcttcattgtctcctcagtaggacctcacagatcatattttatgtttaactcagacgatccatcaggatcaaactttttttcagtagactcttacctctccttaaaatgctgaacgatctctttcggttcctgcgtctccaatgtaatctggcctttctcgaataggatcatgtacggatatgatttcagaccaaaaatcttctcataattaaacttattctcatcacggaaattataaaaggttacgttagttattgggccttctgccctcaaattctcgttattcacttcatttaattgcgtctgtaactcaacaataaatggtcgctccgaaggtcggtcggtaaatacaatgagtgatgcatcatttcgttgattttgcgttagataatcaatggccttctctctattgttctgactacatcctgttaataggagtatcaaaatacataacacccaaagcctcttcatttatataaccacccaaaatatgatataattggttattaactattaaattcacttcattaaaaaatctattcgctgaaaggaagatgcacattgaacaaaaggaatatcatcatctttatcattattgctcttatcatattgatacttcaacttgtgctttatttttctgtaactaataaagaagaatccacacttcccgattctaacatcccacttcaaaccaaaaccgtagatgagcttaccatctcactgcgtaatgcaaactaacctatacagatcatgaagtgcacttgggttatgagattcagggtggtggacagtcaatgctttgtacagataaaatctcgatttttcacctttcaaatagcaacaaaaacctgcatagccagcctcggcttcacagtttttattaagaatttgcatgtggatacatctcatttacaacttaggcaaccaaaaggggttctcttccttctcacacccggttaacacgtaaaaaatatgtccctgctcactcttcatcgtaccgatccctttgcaggtgtctgtcttcattccctgtttggagccataggcatcccttgagttatcgtaagtcgattgaatagctgtaccatcatagatcaattcctggataatgggcccaccttcaatggtatacatcgttacacgaacctgatcctgctgttttttcttcacatttttcataaatgtgtcccacttatcttcgttccgtatgcctccatgaagcacaaccacatcgccgctttgctccgcttgctctggattatgaggctcaataatttctgggaatgatttcgtgattactggagaatccgttgttggatcatttgcctgacaggcagttaacagcattaaagctaacgataggataagcatactttttctcattccatcacctcatgtatgaaacgcttcaatcttatcctttgttgcatgattatgcttaatttgtcatttatctgtaactccctcgttgtcccgaacgtactctcacacctacatacaagaaaaacccttcacgcaagcgattcagatccacgttcccatgaaccgatgcctgcttgaaggggttttatatttcgatcacatttatttctcgaatcggaaccagccgaagtcaaactgactgcctggcaggaagataaagcttactttttgcacacctgtcacttgctcaagctcaaacacccgctcctcatatccacctgactgggtgaattcaaccagctggttgctctggccgtccgcacctgcaaagcgaatatgaatcgtatttttatcaattggtgaatgaccgtagatcacgagctttgatgtaccttctgccgtaaagtccatgttttcaaactccagcgatacattattcccgatgccctctactccatcaccctcgattttgaacgtatctccgtagagatggtcacaggatgtagccgcgttctgttcaaaagcacgactctgacgttcgaaggaaaatcctttaatatgaatcttctgtttcagtacaaaacagatcgacgtgatcccgctaaggcgtttggacaattggtacgtctcttcctggtatacattccaaatggactctttgtcataaaccacatctgcgatcatcgtacttccttcttcatccggcatgccttcccagatctgaatgaagtagtcctccgtggacaacgtaaagattggaatggtaatcgtatcggagccgtacggtccgaagtcaatattacggaaacctacatgcgtctctccatcccgacttgtcgctaccccgcgctcattgccgttaccaacctcacctttggtgtaatcgtacagtccacccgtgatgaagccgtatggatctttgtaggctgtgccgagaccgtccgccttgaactccagctgcgagatgagtttcgttttatccgtaccgttggtactggttgcgcgaagtctaaactccccgtcacctatagccgacaccttcaccgcatgttgatgctcaccgttgtcgcccgcttctgcttgaacagcttccaccttggcaatgttggattcaattcctgcatcgttcacaacagcccactcgatgtcgcgataggaagtgttctctggatacagcttggcggttacaattaactccgggttggacggatcgagcaactgtcctgcagtactgatgatctcgattttccgcaaaggaatttcctgagcattccccgtaagcactggacgttcttcattgttcatgaagacaggttgcacttgtttctcatcattaagttcagccgccacaagtagagattcaaattcagccgtagctccttccaacccttcggaagaaacttcaatccgcactgttccaggttcatttgtcgctccgatgatcgccatcagcttgccgctgaatagtcttctgctcaaccctttgtagggatcatagtcggtgctgtccccattatccagacccagcagtcgtcctgcaccagtcacctgaacttgcacgcggttgttcgcattgtgaaccggattacccgcttcatcttccacatcaatttctacaaaaataaggtccgttccactggcttgcaactgcgcccgatccgcttgcagacgaatcttcttcgcatccgtataggatctttgcacatcggttgcaatgatcttaccgttctcatcgtaagcgatcgctttcagctcaccctcttcgtacggcactttccaccagccagatagctgtgttccgttggcatgatcgatatcgtacgtaccaatggttttaccgttgagttgcagctcaatcttcggcgcgttgctgcacacgcgtacatcaatgatctgacccgggctgaaatcccaataagggaacaggtgaaccatcggactttttttataatccgtccaagctgcttggtagatgtaataagagtctttcgggaaagttgccgtatccaactgtccaaaatacgaattcttcgtatgatacggtgtcggctctccgatataatcgaatccagtccacaggaactgacccagcgaatacggtgtatcccgttctgccaagatgcagtattctgccgacttcgcgccccagctggtcgtgctgttacccaaagccgagcactgctcatcatcatctgccagaatcggctgttcgaacgggaagtgataaatgccgcggctctgcaccaccgatgacgtctcactaccatagatgatccaatccggatgttcttcatgatgtttgtcataatatttttccgcgtagttgtaacctgccagcttcacgatatctgcgcatttttgtgcattttcccacggcatataattggaaccaatcgtcacacctgcattgcctttcggatcaaattccagcacatagtccattaaaatgcgagttacttcctgtccacgctcatccgcatgggtatcatagatttcgttcccaatactccacatgatcagactggcatggttacggtcacgcttcacccaactcttcacatccgtatgcacccactccgggaaaaatctcgcataatcgtatggcgttttggcacgttcccacatatcaaaggcttcagacacaaccagcatccccatctcatccgcaagttccatgaactctttcgcaggcatattatgcgccgtgcggatggcgttaacacccatttctttgagcaaaacgaatcttctacgcaatgccgtcaggttaaacgcagctcccagcgcaccgagatcgtggtgttcacacacgccgttcagcttcatcttaactccgttcaggtggaacccttcattggcatcaagtttgatatcccggaatccaatgcgctgtgataccgattcaactgtccgatcttccgagatcaatcgcaactcagtcaccagttcatacagatgcggtgcatctgggctccacaagtttggattctccacaatgatctgttggctatctgatacaactgctttctcacccaccgaagccgtaacattcgcttggctggatgccaccacttgaccttcatacaagatcgtatgcaccagttctgcttgctgattctgttccaggttcaactccgtatccacttccacttgccagccaaccggttgttgctgaatagatacatacgttccatccgtaacaatatggttgcggtctctcgtcttcagccacacatggcgatagattccggccccggaataccatctgctgttcgggctctgatgcaccactttgaccacaatctcattgtcgccttccaccagtgcattcgtgatctcatgttcaaaagcagaatatccatacttccacttcccaaccagctgcccgttcacatacaccgaagagtccatgtatacgccatcaaaacaaagcaaaagctgctgcccatccttcgtgtaatggaacgtcttgcggtaccatccaatgctgtcctcatacagttcaagcgtattatatatcagccaatcatggggaagctccacaggttcatacaccagacccgcaggttccgtaacatccagcttgcttttcgcaaattgccatccatcattaaaaagtctcttctgattcatggtagattctcactttcttgaagtaaattatgattgcggttacaacagtagatgtcgctttttccgaaaaccttttcggtaatacacaagtatgactataacacataacccgattataccatcagtctctttcctatacctccatttgataagattttttagccgtaatgatgaacgttttattccttccaagcactgtaactttcgatgacaacaagccaaaaaggcaacccgtcaaacgagtcaccttctagttctatcctatagcacgtacttcttctctatacactcctacaccaacactactcaacctctattccttgtaaaaagggttccaccctatgcctttgcccgatggcatcgcgccaggcaccccatccgcttcaagcagcggacggacaactaacttcacgggccactcctcgctctcgaatatcgcatgagcgagcgcggcccggtcggattcgggaagctgcacatgttgcagcgcttccttccaagcctgctccgtgatctcccataacttcgtttccgggatgtgatacacttcgctaagtgcctccatgatcgcagccagattcacctgcgtccccaaagactgcacatagaaaatcaacttctggatcgtctcgttatacaggctgttcgagtagcctggacgaatatgataggcagggtctgcaatgccatgtttatccagataaggctgatgcaaacgcaccgaatcatgatcgcggaacaagagaccttttacctcattatccttcaacaccagacagcagttctgaccatgaatctcaggtacaacacccaccttgaacaggcgcatcacgatatcataaaacgttgtaactatgctggtataaaagtagaggacatccgtgctactcaggttatcccccagaatctccgttaatagatgatgcccttccagattcacacccagtgtggccattgggattactttgtaagcatcacccaacaactcagtgggatacacacgaatctgtgcagccagatggcggggatgatcatcgaacagtcccatggattctggcatgaagccccaccagttctgctcttcacacatatacaccttgtccttcaacgtctcgtcacaagcaacggcctgccttaacatgcgttctccagcaagaccattcagaagtttgactaccggaagataacgagcagcccccagagacagcacactaaccggtagcttgagcattagggtggattcaattgacggagccatcgagcgcagagaggatgtggcctgtacgtcgcccacttctatgtccaatacgacaatgctgccttcttcgatctccccagtgaaacggggcagaatcacatgttccaattgccacgggtgaacaggcatcggtagatattcgtccaacgtgattcctttacgggtaaactctgcttccaccactccgcgctgaacatcgtctaacatatccaaaatggacaatccatcttcacacccttgctgcacggcatccagccgtatagccacccagcgcagcgaaatcgccttcccgaattctgctgcataccgagttacatcttctgcgttgaatcccaccttggctttggacgatgggtgaaatggacgatcccgcaatgccgcaacgcgctcacctttgataaaccattcatacgcagaagccgggacattagcggacagatactggacttgttcccagcccaaagcatactgctccacagcaatgtccagactaatcaggaattccgccaccccaggctgcgcatagtccttatccgacaaagccctctgtaacaccgcacgtccaacttctgccggagtatcaaggagaacccagcttccatcagttttctcctcgtagatcggtgaaccctgaacccactgagtcccctgtcttactccagtttcaaccagacacagcacgccttgagtgtgcaatctatagcgagaagctacattctgattatgctcttcgctgtcatatcccttgtacaatcgacggaacggtgcaggtgctgcggcaaaatcaatgaacgggtgattccccagtgggattaattgctccgacaaaaatgaattcatcagatccgccataatccggcgttcagcggcttgcagactggaacgtttcatcagtgttgacatgattattgtcctccgttagataatggaatgccgggtgcggatgccccagaaaatcatgatgcgagatggtccagcaataagccccagacttttcaaacaaaacaatatctcccacgcgcagcagtgctacctccgcatcagaatgcatgcgatccttgggcgtgcatagctcacctacgatatggactcgacgatctcttacctctggacgggcaaatgaatgcttccaacggtccgtctccataatctggaacgggtggttatgcccccatgaagcaggcagacgattatggtgcgtacctcctcttaacacggcaaaatactgatcatgagaggttttgatatccgtaacttctgatgcgtagtacccatggtctgccaccagtagtcgacccgattcaaaatacagctgacctccgcgtgaagcaaggcgctctctggcttcactttgctccagcagggaagtgaacaagggccagtcgaatccggggctgccatcatacgtgacaccgaacccacctcctgcattcaccacttccacaggaagatcatactgttgctgccactgctccaccttttgcaaatacagttcgatcatctcggcatgcagcctggcgtccatattgttagacaaagagtgaaaatggaacccgcttaaccgaaccacacccgcgccttccacacgaatgagttcaatggcttcttccaccacctcttcatcgattccaaaaggactcggcccaccgcccatgacaatcttcgtccgaggtaacgtactgctccgcagattgattcgaagaagaatgcgaacctcctgcgctagaccctgttgttgtttgtgtttcggctcatgttcttgattcaggccttgcatcagttcctctccatactcttgcgtatatctctgctctagcttctgctcccattcttgcttctgcctgctcccctgctcctgcccatgctcttgatccttcgctcgctctttcgcaatcgcaatgatgcggcgcaactccagcaaactctctacatggatgtagctcacgccctgctcgatcgccagcctcagttcgctctcctttttacccggacctccaaacagaattggaacctcgcgacttaccgctctaaccttcagcagctctccaattgaagccacttcaaagcccttcaccaatggaagcagcgcctcaatgatttgcggatcaggattcgccttaatcgcgtagaacaattgtgtattcccaggcatgctgcccaacatctgactcacctgttcctgaatgccagccagatcgtatacatacgcacataccggatcttccattccgcgttgcagttcatctatcgtatgccatacaccaggtttcatatctgcccacccgcattcctgtagtcattccgtttttgggcatacgcccgaaacgccgtattccgatcatcaccaagcacgtatatatgtactccccgctcagtccagagcgacatatcctccacacctctggtgaccgttgcataaggtacttcgcactgccgagcggcagtatgcaattcatccagtgcacgtctcacatccgggtgctctgtctgccatggcacaccgagggattgcgacagatccgctgccccttccaatacaaaactcacctgagggtgagacagaatctgtgtactttgccgcacgccctccacactttcgatcatgggtacaaccatcacttgttcgttcgcttccccaatgtatcccgtgagcggatatttcccgaatacaccgggacgaccactattcaagctccgcgtgccaaccggatggtagtaggcatgacgaaccgcttcttccacctgctccagttgctcgacatgcggaatgacgatgccttgtgcgccacaatccagcaccttaagaatctccgctcgctccactttcgagatacgtaccaacggggttaggccgaccagttccgccgccctgatcaactcttccaccgattccatcgatgttgcggcatgttccaaatcaataatgacaaaatcatattccgcatgtccgatcatctcgatgatcaccgggtgtgggatcgatacaaaaaggccataaaccggctgtttacgtgcaattttttccttcagcgtgttaattctcatttggcgattccttttaattcgggtgttccctgtgattcaagtgcatcctttgatatcttgagcggattgctcgccttgcggaaatataactctccatccccatacagacggcgcttggtcatctcttcgatcagtgcatcttcggcaaaaaggtcaaatgcagcgaatcgatccgtgtactccgggtgctctcgctgataatccacaattacacctgcgcacagctgccagaacgcttcctccgacaacccaaacttctccaaagccagcgcaatatctgtcatgcaaataaaaaagaatgcatcatacgtatagtcccggacttccgacacatctccggcatagatgaaggaatatcgattgaacttgcggtgggtttccggctcggggttcagcttcggtgcccgttccgggtgcaacagttgatctggtacatagcgaacgccatcatgcagatccttgataatgattcgtttcggcagatcatcttccagtaccaaaataatattctgggcatgagattccagcgcaatcccgtgtgcatagagcaaatgaataatcggcagtgtaactgtgcgaacaagggcctcactccacttttccacaccatgtcgctctacagcatcttggataaatggaacaccatccggctgcaccaacatcaatgcattcagcggccacgccgtctcaccttgcttcaggtgaacagaaacattctcccgccagatggcaccgagtgtaccgtaggctcgtccatactgagttacaggcaactgctcataacggaaagacagtcccatgatttctttcaaaatgccaaactgcgcctgctgcaacagctcatcttcacgaacaagttcatccagccaatcgctgatcagtggcgcgttctgagtcgtatgctgtgccagaatgcgtgtgctcgacgtgttagtgatacttagtgccaacttgatgtaaggtgcttccggatttacccggttcgatagcgaacggatcgactgctgtgcacgataaggcgaagacgatggaccaagatacacgatgtctccatccatcaactgacgggcatataccgattccaactggtgctcccactgccatggatgaaccggaatgaatacatatcgatcacccgccttagaacctatttccccatctaccttgctgtctttgctgccaacgctagagcctattaagctatcttgaacagctgttatttcaccaacctcggcactgctcccaagctgatctgcactcgccgcatatgcgttgacgttctcacccgtgtccgtaaaaccttgttgttgcagtatctgttgaaatcgctgtacgtcctctgcggtcagatgttgtcccaccagttcttccgagctataacccgcggatacagcggtctgagccaattcttttttcacagcaacccagactaatgaaaccttcgagttaaattctgggccataggccagattgtctttcaaagaaaatcccagcctcgacttataactcgggtggtacagatgaccgtcggtcatgtgactttcaagcgcatcataatgccgatcttcattcggaatgttcaagggcaatatagcttggcactggctgtcctttgccatcgtttcgagcagttcctggataaaagccgtgacatttgcacccttcaacgcgttcagcacaatttcctccagaaacagatccagatcggtgcagggtacaccttccctttgaatcgaacccttcttcaccttcacccggccaaatgaaaacttccgttcggcttcacacgtgtacgccacagaatcgccagaagatgtaagtccctcggttcgccattcgctcccacttacatgactgtccagaatgccttcgaaccacatcgcctccagtgtctgccgcatgatccgttcctgtacacccacgtagactgcttctgtcttgccgcctgcttcagccctgtatcccacgactcccacgcacttcactccccattcgtttcattacattgctcaccggcacgtaggccggggtctggctgatccctcttacacaactcaccaagttttgtttggccagaaatgcatccgttgtcagcagatgtcgtacatatgcattgcccgttcgttccagctcctccacaagtacctcacgtacctgtttccagaaatgctcctccgggacgttcacatctcgcgccatcgcatgaatcagagaccccagatgattgacgataaaatagtacgatgtccgcgcccaggctttctctcgcgaataaaataataaatcggacgttgcacgatcctgctcacttataagttcctcatccacactgaccccttccagatcgcggacgataaactcaacaggcaacccatcctttaaggtcacaagggtattctgcaaatgagcttcaaaatgaatgcctttctctcccgccgcccgtacaatcggcagcagagaacatttcagataacgttccagccaacgctcggcaatgtcacgtccaccacccagcatcgccatcagtctcgaccgcatcccgggaagcggtgcttcaaccagactggataagacatacgtattctcaacatcaaactcaatgggccgataagctatcgtaaacagactggttaactcttcatcttcaaaagcacaagtcgctacgcctgtctcatacgcaatatgcgtgttcggttcagcaccgaagcagtcatgctgcctgacgtacttggaggcatccagtgttctgcgcatctgctcagcactgttagtgcgaatcatgttggtgatctgcatgttcagtgacagcttgatattgcagttccattcgggaacataaactgtacggaccgaagaagttggatagacgataggccccgcactaccgagtagaattaatttttcatctcgaaaataggactgtacctcggacaatcgtgatatgtatgcgtattgccatggatggacaggcagcagcccatacatttcactcttttcttttaaaataggctccacatggctccgcaggaggtcatgcaaatccattgccgcctcgtcatcgacccattcctgcacgtagacatcctgcctcacggcgatataacagagttgaaatgatgtccttaactccggactgtacttctgcacatcatcctcgctgaagcctttggagttcttcggaaacggatggaacggatgaccatacaacagtgactgttcagatgtgcgatagtcatggatgtcgagaccggctgcttgttcgatatacaacgtaaggttaccgacactgttatctaccttttgtgcaaaatctttggcatatgaagcctctacatgattcatattctcacccaatggatgtacattctccagctcaagtgaacgcttcatttccatcacacttttcatcattccatgttgacccgaactcgctccctgttccccattcccgcttagttcagatgtgatccaacgaaccaggtcgccataatgcaccgcttccccgccagattccatgctgaggtattcatgctcccccatcgcagagtaataagacaagcgtcctgtcaccttcaacctactggcttgaaaagtaacagtgtacgacagcgtgttcggattgatccaaatatcgctttccttctctagcgcaagctcacggatgtaacagttcaacagcagtttgcacgaatgttcatgggcctgctgctcagcctcagaccggagcttgttttccatctcgaacaatgatgccaaccttctttcgggttataagtaagaccaggggaagtgtaagcagtatggcgcagccaagtccgatacagatctctttgagcgctccccattttgccatctccatggacgttcctgccccggcaagccattgccaacgcatatcgtaatacagggtcaagcccatcaccgcaaacgaagaagccagccgctcaatcgtggttgataacaccgacccttcgtgcatgtcttcgtctgctaatgcttgcagaccaatcgcagagatgctcatacctgacaggccaacgccaattccccggcatgccatgagcatccctatgatccagatcgatgctcccaggggcagaaccgcaaacgacaagatcgatatcgacaccagcaacgtcccccatgcgataaaatgtatggaccgaccgcgatccagcaagctgccgccaatccacatgaacagacttgtacagatcgataagggaatgaacagtgcaccggacagggccggtgacaggtggaagacgtcctggaacaatagtggcaatgcaaagatcacgccaaacatgacacaatcctgaatggtcgagatcagcacggtcagcggaaagacggcattacgccgcagcaactggtaccggatcagcggttccttgcgaccgttctctgtctggacaaaacgcatgagcagcaccacaccgagcgcaatcagcatccaaggtacccatactgccacgacaggacttgcgtacaactgtacccccagactaagggcacctacagcgcagatcagcattatgacactggatggatgccattttttcctacgggcagggatataggtttgaatgactcgaccgcagccgatcaacgagaacacagctaacggcacattgagccagaacaacatttcaagccgtccatactgaatgatgaagccccccagtgttggtccggcagccggagcgagcataagcagcaagccccacgctccggtaattcgccctcgtacctccggtccgtatacatcaaacaacagcacaagtgataacggaatcatcagccccgcggcaacgccatgcatgaaacgaaccagcaagagtacttcaatagagtgataaaacaacgcacctgctaccgagaacagtccatagatactgatgcccaacatatacgtctgcttacgccctagtcggtccacaatcagggaagccagcggcatcgttaacgtcatagccagcatgtacagcgcgataatccacccgcctgctgtcgtagagatctgatagtattgcacaaaataaggcagcagcaggttaaatgcactgttggtcagcaccagcgaaaaagcaccgatcagaatcgcgagtaatactgcatgccttttcatcagggaaagcttcagcatgcggctgttgctaaggcaatcgcttcagctaccgatttctcaaagatcgcaaggattgcacccgattcatgctctgtaatattcagcggcggcagaaaacgaacaacagctgaatgacgcccacccagttccacaattaatccattcttgaaacattcacgctgaatagactcagccagcgctccattaggcagataatgtcccagacgatccttgcgtcccattggatcaaccacttcaacgccaatcatcagtcctctgcctcgcacatcaccaatctccgcataccgctctttcattacattcagttgattcatgaactgctcactgcgcagttgtacgttgtacaaaacatcctgttcccgaatataacgaagtgtcgcaagtcccgctgccatggccagctgattgccacggaacgtgcctgtgtgtgcaccaggttgccattgatccagttcttctttatagatgacaacagacatcggcagacttccgccaactgctttggagcagacaattacatcgggtacaatccctgcatgttcaaacgaaaacattcggcctgtccgtccaatgcctgtctgcacttcgtcgatgatgaggggaatacttcgctccgctgtgattcggcgtaactccttgagccattcaatgtctgccggaatcgccccgccttcgccctgcaccgtctccacaatgaccccacacggtgcggcaataccgctctcgcaatcatcgagcaggttctcgatatactgtgcgctcaaccgggccgtcatgccttcaccaacaccaaatgggcaacggtattcataaggaaacggcaggaaatgtacatcgggcagcaggctttgcagatgttgtttcttgctcagattaccactcatcgacatcgtcgcttgggttgaaccgtgataaccaccttgaaaggcaagaatggacttgccgcctgtagcatatttgaccagcttaatggctgcttctacagcatccgctccggttggaccacagaactggattttggctttgtctcgcatctctgccgggagaatggaaaacagttcttgcatatatgaaagtttcagcggcgttgccaaatccagtgtatgaagcggaatctgctgatccagaacatcgcgaatggcgttgaccaccgtgtcatggttatgccccagcgccaatgttcctgcaccagccaggcagtcgtagaatacgcggccttccgtatcggtaatcttcaccccatgggccttgttaatgacaagcgggaaatgtctcgggtacgatcttgcattggattccttctcattttgcatcttcagatattccgtctgcacctctactgacatagccctctaacgctccttataatcgattcaggctgaacctgctgcctgtgattcttgttctacattttgcatatgacatggtattggttcaaaatcatggtgaggtccgaattaaatgatggtatccgttatctgtcatccgtcatatattgtcatctatacgttgttataagctacatatcttatattcaagttgctcctgacacaggtattccaggtataaccgaaccacatcacgagttgttccaccatggggaaagacgtggtgtgtcagatctggcaaagcattcacttccagaatgcccccttgttctctggagattggagtgcggatatcacgacaacgaacatcaactcctgctacatcgatctgaagagtcttcgccgcctgaatgatcatccgggcattttcgggatgaatgatttcggtacaatccttgtagaattcactgatttttccggcggcagaattgcggagattgtataactcaatttcttttcccgcggcaggaacttcatccagtgttgtcccttgtgcatgtaatacctccagcagtcgttccgtttctgcattaacctcgggaaacgcttcatactcgccaatgagtgtcatctcgattcgttcctgattcaactgctcaattaacgctcgaacggttgaagttccgtctccctcaacatagacaggccgatactggttcacagccgccacttctccgttgatgatcagcaccctgtaatcgatcccggtcacatattgctgtaacataatgctgctgccgtggacactcgcaagatgaatggctgtctccagttcttcttcagtacgcacatccagcgtcacgcccatgctgctgctcgcatctagcggtttcactacaatagagccgtatctattcagaaaagctactgcttcgcttcccaactctgggatcacgataaatgatggtacaggcattccctgttcatgcagcaacatattacatgcctgcttgttcttcgcgagcagtccagcgattaacggcagacgatgagatctggttttgttaatgatgatctcttggtcccctacagacagcttcaggaaatcttcgcatccctcaagaagtggctcacaggtaatgcccatttctctcgctttgcttataatgagtcggttttgcagattatgaatccctttcggaaacactgaaaatcctcctcgatagaatgaaggtactcgctcctatataagttgaattaaagattatttacgctgacactacaatgacagaacaaccttctaatcgctgttatccccagatttttttgattcccttttctcaagggaaaaatccggggataaaggcgaacgcttcgctttttcaggttttttctgtcctctccgttgcatgtaaatgattaattcaacttatattgctcatacgttcatcaatttttattgtagtttaatattgataatgattatcaatatcatataaaatctattttatggcaaatcgagctatattgtcaataataaacttttaaggaaaaataagatttaaattagtgtgggtttgagtcgatgcaggtatgcttttatcgaataataggcacaacaaaccaggcaagcctgggacatggttttaccaacggcttgcctaatttgtcatctgcatgatcatacaatggagtcgatgtagagttttgaataactattgaacgaatcaaaaacggactttttgatccttaagccagttgtgtataacgctgttctccattcagcttccttccccttccatgcgggatacaggttggtgtgccaaacagtggatcaaccgcaatctcacactccatctggaagactttacggaccatgtcctgtgtaacaatatcttccggtttgccttctgcgtagatcgacttgttgtgaacagccacaatgtgatgcgcataacgacatgccagattcagatcatgaagtaccataacaatcgtgcgtccttcccgttcgttcaactcaaacaacagatcgaggatatcaatctgatgtgtcatatccagataggttgtaggttcatccaatagcagcgtttcggtaccctgcgcaagtgtcatcgcaatccaggcacgctgacgctgtccaccggacaatgcatccacaggtcgatcagcgagttctgtcagatgtgtggactccagtgccagcttgaccatacgctcatcctctcgtgaccattgcttcagccatgtttgatgtggataacgtccttgcttgaccagttggttcactgtcaatccttctggagcggtcggaccctgcggcaagatggacatgcgccttgaaatctccttggtcggcagctttgcaatctcttcgccatccagcagcaccgaaccggagctggatttcagcaaccgggccatcgtacgcagcagcgtagatttgccacagccgttgctgccaatgaggacggtaatctgtcccttgggaatggtcaggttcaaattttcaataatgggatctgctccataggagatcgtaagctccttggcttccagaatactcacagctctctcctcctcataactgatttcgattcttgaacaacaaatacaggaaaaatggtgcgcctacgcctgcggtgaatacccctgcgggaacatccagcggtagaaaggcagtgcgggcaatcagatctgccacaaatacaagcagagcaccaaccagtccagacacaatcagcatactgccaaacatccgtccaaccagctttcgggcaatatgtggagcgatcaggcctacaaaaccaatggttccggcaaccgcaacggcgattcccgccagcagtacactgcataacaacaacgctgaacgatgccgctgtacagttacacccagccctgtggccagatcatccccgaactcctgtgcattcaggctacgggcgaaccagatcgccagcggtataacaattacgataaccggtaaaatcgttcggacatcggtccacgatgctccgtatatacttcctgtcagccagatataggcttgacctgccgtgtagaatggactcaggatcagcataaaggtcgttccagctccggtaatggctgacactccaatcccgatcagcaccaggcggatcggactgactccctttttccaggcaagcacatagatgatcaaagccgtcacaattgcgccagcgatggcgaacaatggcaacaacttgatacttaccgctccacctaacagcgtaacaaaacctacagctgcaacggccgcgccgccggtgatgccgatgacatccggtgaggccagaggattacggataatgccttgcagaagtgcgcctgacataccgagggctgctcctacgagcagagataataacacccgtggcagtcttaaggtcagcacaacgaagtcatgctcccctgcattcagaccaaatatcgttcttagcacatccagcggagaaataaagtcactgcctacactggttccgaccactcctgccaccaggaacagcaggatacatatgccgatgacaaccaatgattctcgttccatttgcaccgagacggtgtcttttttgttgcggaaagtcaactgcttcctcatatcttcgtcacccccttacgggcaatgtacacgaagaagggtccgccaatcagtgcagtcatgacaccgagtggaacttcctgcggcatgatcaccaatcttgcaaccacatccgcggacagcagcagaatcgctccccctacaatagagtaaggaacgagccagcggtaatcattgcccaccagtgcacgcatgatatgcgggacaaccagaccgaccagcccgatcgaaccggctacggcaaccgaaccacccgcgagcaacaccgtaacaattcccatgagcaccttgaccagaagtacattctgtcccatgcctttggcgatatcatcacccgtcaacagcagattgatggctctacccatgaacagagcgacaatagctgcggctgtcatgtacggcagaacaggatataacatatccaacgtccgtccacttactgaaccggcaagccagaacagtacatcctgcaatccggttccatccagcaccagaatggcctgtgtgaacgaggcaaataacgcggagattgccgtacctgccagtacaattttgatcggtgtcaggccatcacgaccgagggaacctagcccatatacaattgccgcggctacagcagcccctgcaaaaccaaaccacatcatggtggttagcgaggatacggacaatacaacaatggcaataacaataaaaaagatcgcacctgcattgatcccgaacacacttggtgatgccagcgggttacgtgtcaatgcctgcatcagcccacccgccacggccaaacttgctcccacaacagcagcaataaccgtacgtggcaaccgttccgtcagcagaaccacatgttccacagaactctcgtcatagaattgcagtgcttcccatgccatctgaaacgtgatatgcgtacgtcccagaatcatactggttaggcaagcaagtagaagtattatgaataaaccaaccagtccatagatcttggcacttgcctttgtaaaaaggggaaacatactctcactctttcatctgtaaaatgataaaagacctgcctgcccatacacttcgttaacgaatgttctggtgcatggcaggtcctcctcctgttcgttagttcaggttgaactgcttatatagatcgtccagcatcatgttggccgatgtgtatccacctgccatgttccaggccacttcatcgacctgaaccagttggttgttcttaactgcatcaaggtttttccacagtggactgctggtccaatcatcataatttttctgaatggcatctgtttctgtgcctgaattgaagttgaagatcatgtctgcattcatatctggaatgttttctttggaagtcaattcaactccccatgtgtctgcgtcatgtccggcaggtctggtgaacccaagatcattcagaatcttacctgcatatcccatgtagaaaatacgaacttgatcggctctaaagttcgttatggttgcttcaattggcagacgatcccccattttctctttaaaatcagctacacggccatcccaatcagacaacaatttatccgattgctcaaccctattcatcgcttccccaacagttttcaccgtttctttccagtcaaaaagcgtctccgtcactaccgttggtgcgatctgcgacagttgctcatagatctcttcatgtctgatcttcgtagcaataatcaagtcgggtttcaacttgttgatctcttccagattgggttgcgattcctgtcctacttgtggaactccgtccagatctgctctcagatattcatagactggctgctgaacccaggattccaccacgcctgtcggtttcacgccaagtgcaacaacgacatcattcgcaccctggaacagtgtcacgatcttttgcggggttcccttgattgtggtttcgcccatggcatgtttgatcactcgggtctgatcttcagtcgcactggcagttgtatcactttcattattgctctcattgctgcttgcagcttggctggacgtatttgttgtctcggcacttccacccgaagcacaaccagcaagtagtgaaatcatcagaataagtgctgcataaatgtatagctttttctttactttatacatgaaatccgtctccccttttttatctaaatgatattgaatctcattatcaattgtattgtaatggagatgaaatcattatacaagcattttatttggaaaaacttctcactccctgtcgaactctgtaacttcataaaacaacattaaataaagataaattaactaaaccaatacaatatatatcgatacaatacgcctccacataaaccatatatgtaatttttttcttacctgctaaatatacaaatctctcttcttacttttagcttcatctaatacatgtcctttttgctggtgaatcattattcattcatatgcgtttgattgatgaatttactgtaaaaaaattcctgtaatttcttgttgtactatgttagattatccattggaataaaatcacatctatagataggggatattaacacgtgaagaaatcatgggtactatcaatcattatgagttttgtcttgctcggcggggtgttcgcacctgtagggtcctatgccgctgctgcggatgactcagccactacatattcggaagacgaatactatgaagagattgacacgtcagaacaagaaccgatccctacagtcgaagaagaagatttcctgggctaccttgatcagttggatatggcatcggtatatgaggagagagccttcaatgctttgggaggtggattttacattacatcatccaatcgcaagtccgttttcctgaaactgaccaatacagcgattcctaactacaccaaatatgtttccaagctgaagctgattaaaccgcaaaatacagaattgcaaaaaatccatgccaacttgatcaaaggtagctatacacagctggaaggattccaactcgctaaaaaagcggtctccaaaacaacggtaaacagtgctgtcctgaaacaatccaatgccaaaattgctgccgggaagaaaaatatcgagaagtttcacaaagaattctctgcatacgccaataaacttggatttgatttataaaaaacagtaattgcagatacgcgtcctacatttcgaataaaacaatttgaaatttaaggaaaaaaagtgttttcttttgctgagttagttcgtataatagcactataatcaaaaggctatgctgccgaaaggtacaacctcgtgaacaattgaggttgtgccttttttgcgtttaatggccgcttttatctgaatttcatcatctgacgaggagtgatttacatgattcttgaagccgtttatcatcgccccaaactcaattggtcctatgcttatgaccgctcgaccatgcacctgcgacttcggtccaaacgcggggacctggatgcggtgattgccattacgggagacaaatatgcctgggatcggacgatcacacacatccccatgcacatctttgcccgggatgaaatgttcgattattgggaagccgagacttcacctccctatcgccgattacggtatggtttccaactgattcaaggagaggaatcggtctggatgacggagcgcggattcgagcaggcgctgcctgatcatccactcgaattctttgattttccatttatgaatccggtcgacatttttgaaccgcctgcctgggttaaggacgctgtgttttatcagattttccctgaacgttatgccaatggcgatccatccctcagtcccaaaaatgctgaaccctggggaggagaacctacaccggtgaacttcttcggcggcgatctccaaggtgtgctggatcatctagatcatataagtcagctcggcatcaatgccatttacttctgtccgctgttcgaagccacgacgaatcacaaatacaatacaggcgattacatgaaggttgatcctcactttggaaccaatgaacagttcaaggcgttcgtggatgcctgtcatcagcgcggcatacgtatcgttctggatgcggtgttcaaccattccggcagagagttccctccttttgtcgatgtcatgaagaatggagctgcctctccctacgcagattggttctatatcaaagattggccgccgcgtgtggaggatggtataccgacttatgacacctttgcctttgaaccgctcatgccgaaactgaatacggaacaccctgaagtgaaggcatacctgctagaggtaggtcgtttctggatagaggagatggacattgacggctggaggctcgatgtagccaacgaggtggatcatcagttctggcgcgaattccgtcagacggtaaaagccattaaacctgacgcctatctgctcggtgagatctggcatgattcgctcatgtggcttcagggagaccagttcgatgccgtgatgaattatccgtttaccaactcggtattggactatacggtgcacggtaagctcgacggactcgcatttgccaatgagatcggcaaactgctcgcagcctattcacaacctgtgaccgaggcgtccttcaatctgctcggaagtcatgatacccccagactgctgaccttgtgtgatggagatgagcgcaagatgaaacttgccgttacgttactgcttacgtatccaggtgtgccatgtatctattatggagacgaagtgggacttgatggggtatatgatccgggttgccgcaagtgtatggagtgggatgagagcaagcagaatcgcgagcttctggaatttttcacccgtacaattacacttcgcaaacagcaccctgccctgcgcagcacggaactgaagattgtatatgcaaaagccggagacccttgtcttgccatcgaacgattggattcgcatacaggagagcgcatgcttcttgttcttaatgctggtgatgaaccatgcacccttgaactccccttgggagatcgtaacatctggcgaaatctgttcacatcaaacaccgtggaagctcggcaaaataaactgaccctcgatctagaagcatacggattctccttactgcaaatggagaccaaacaacccgcgaaagcctgatatgaatacggctaacaagggaaaataactccaaagaggctgtcccctaggtgatatgctccccataaagtagacaggtaaaataataaaatcctgttactgtatgggtatcatatcagaccaaggacagcctcttctgtatcttatacgtcatatgctaacgaaccaagcacactttatttgcttcattatacccgggttaaatgcctaacgaatcagagagaccttatttcgtccaataggtcgattttcgagaccagaagccatatttttgaagcaataacgttactgagattcgttaggttttacttttcttgattatcccctcaatacgatgtttgaggttcgttagcgataccgattcaagcaaggtgaaactcttcgaagcagcgacctatttcccagccgaggcgaaggatgccgaagtcatcggttttcgtattttcttcattcttgagcttacgagcgctccctgtgtaattacgattttctgcggaatcttgtatgaaggcagcttgtcctgacaatattcccagatggatcgccgcagatcagtgagagtacattctgtagccagccggatcgtcactttcaccctctgacccgtgataccactctgttctcccgaaactacggccgcttcaatacattccatctcttccagaacaccctcgacctcggcaggatacactttccgtccccctacgttaatgatctcggaacgacgtcccagaatacgaatgtaaccctgctccagcacagcttcatccccagtacgtagccacccgtcctctgtaaaaggtgaaggtgcattcaaatatccaatcatcgcggtttccgtgtgaatctgcaattctccttccaccacccgatacttgaccccttcgtcttgaatggaaaacagcaacgagcctggctctttggagcgggttggcagaatgccaagttcagacataccataggcttgtatcgtccttagttgtggaaatctccggttccaggctgccagtacggattcgggcatcacttccgatccgtatgatacaacttcgagactcgacagatcatacccctcatcatttttgcccagcagtaacagattcatgaatgttggagagaccggaagagcctgcacacgaaacgtctcaatcgttcggcacacttcttcgggagatcgatctgcaatgatacagagacagcccccactggacagggattgcagcatggtattcacaccgccgatatgatcaaacatcatgaatggaatcgttcgcaaaggccgaacctgccgccgaaaaccatgtaacagccgatctgcacgatggacagtcgctttgcttactccagttgatccagatgaaaagagtaccagtccgcctacgccctcctgggccagcgaggataacaacacaggaacctctcccgataattcacacgtttgccgaatgcacaacttgccttcttcaacgcccaaacgccacttcacctgtgccagctggatatattcctctcgtttggcttcaaccaggttccgatccatggggagcacgatacacccttgtccgagcaaagcaaccaatgctgccgctgcatagggggaatagtcttcctccagcgttacaagttgcccagtcagcccttctgctgtaatccacttactcatgatgccaacctgttccagcagccaccgatagctgtactcctgatctctccagatcagcgcaggttgctgtccctgttccgcgaatcgttcaagcaagaattggttcaacatcttgcatcctccttaccggcaggcgcccattgctgtgcgagataatcaacaagtgaatccacggtctgatatgggctttccggcatggaagcagcagccatctccgccagtgcggctcccatccccgttccccatcgatcttcgattccctgctctaccactgcaagcaatgacacgagttccagcgaatccagttgcccacttcgtccgtacagtggagcgttaccaccctcaccaagtggaatcgttgtattatggtacgcgtttaactcccgacagctatccaatacgatacggagtaaatcctccctgtgttcttgtccaatcatcgacacagtctgacgtgggaagcaatctgcctgaggtatggactgccgaagcgactcataccattgccattcatcggtgaccaacattttaattacacctgttagctgtactttccagtactcacgctgctttatccgactgacctgaagcatattgtaggccttctcccaacgtacaataatgtcgctgaattctctcgcatattgatcaagtggagaaccgagccataaggcagattcctgaagaagatctcgaagaaaatatcgactccatcgcatatcaaacagcagacccgatattaacatttcattggcctgatccccttcattcgccccacgtagtgcatctaagagtcgcagagacaccgcatgtccaaaatgaaaattccgctctccttgtgtaatcgtccggcctgtcagaaattcttcaatctgcgttgttaacgcctggatcaacatgtctcggtaaccgtcagagtccagcttcacagtcgcccgaatgtccatggttccatacgttcggagttcttctttgcgtttggcctgcgcaagctcaggtatactttggttacctttccagaagtcatgaaaggccttttgagtaacctttcccttatacttggagggcacgggatcgtagacgtgaacatgctcatcttccaaaccatatacagcaatccaatggtctaccagatgtagtcgggagccctgcttcacatgtttgcgaatgtactcgggattctgataatcctcacagtaaggcaggtgataactggttcctgtagccaaaaaaagcccaccttcgccaatatgctgccggatctgcgtcttgccttcctcgaagctttccagctgtcgctgaccatacatctcccagatcggctctacataatccagtttgtgaaaataaggcttcaccagtccgttatccccgcacgaaggaaggctgtacaaccgacttgccgccagcagtgcaagacttgtgatggatccttgtcgatggagcacttcatgaatcagagggaaattgcagggataataatagggaatgtccagcactggagcgaatgaaggaatgatcatttggggcctcctgttcccgttttggctgacgtactgccccaggattggattaggtaatgcacagacatatcatctgtcgctcgaaatacccgattggcaataggtttgccatccacatcggtctcgaaacgacggaaaccgcgagtaaaccggaaggagaacccactatctcgcgggactcgataataaccttcatatcgacctgtaccagaacgaacaagcttcatgcccatcccaccatatatcgtctcctccgagtcttcgtcgggagctacgtctgcatgaatgcagacctccacatgattggacaattcaggaacgacagtgtagatgcgtgtagcagacagttctcccatagtcagcgtgatggatgcacttccaataccgacaggaaccaactctccactcgcatgaacctgaagcacatttgggtcactcgaagtataattcccatgcagcagactctgaaccattccactctcgtagtgcatttgtgcattgatacacacggtcattccaccctctagtccgatgacatcccttccaagcagttcgagcgaggagggcttacccacgtggccgaacatgtacagtaacgggaggtgaatgcgcgctccccagtcaccttcctgatgacaggcacccggctgttccagaaatgccaattcctcatccgatcctactccgcgttcaagtaattggtgagctacccttctgacctgagaaggcagaaacagaccttccgtatctccaatatccatccatattcgaacggcaggtaccccctctagcaagcgatacatgtcttcttccaacagcccgctcttcgatgtttcgtccagctgcacatccacatagaatggcgacatcatgatcagttttccgaaaacatccggatttcgcatccccatgtgcaatgtacaaagcgccgcggcagatgaacctaacagccccgtattatgcttgtccggcaacgtccggtaacgatgatcaatgatcggcttgagctcatgaatgatgaaatgttcataggcgatgcctgagcaacccacactcacggcctctctctcaggtgcaatgaagtggtagaattcgttgtgcgtgactgggcggacatgcgtaattgcgacaataatcagtgattcaatctgcccggaggaaataagaccgtctgctgtctggtccatattccatgtttcattgcctggcccggatggaccaaaagcccgctgccccgcatgaacgtacagaaccggataatgccgagctgtctgctcatggtaaccgggcgggaggtacacataaatgttgcggatattgcccagccgcgacgcctgaatgccttccaaacattcgatgacagaatgggtactcaacgatcatcaaccgcctctcttctcccaattcgactgcataatacaaataaccccgcctcagaagagacggggttgtcctagaaaacacgtaagtgtcccgggatacatagcccttatattgtgaatctgcgaatagtttaaatccccggacgtgcttttgtaaacataaaaatagaaaataaatgctcccaaaaaagttattgacataagatccaatatttcttacgataacgttgtgatcataactcgagggccatgcttttaaacctgagcggtttaggacaaccccggtaactcccgaaggagatgccggggttgttggcgtgtcaaaaggagggaagtcttcaatccactgcgtaacacttcgctgtattgaaagcgctattattcaagagccgggttggttgtttatctaaactactacattcacgagaagggtggattactatgtttcaaatggccaaacgtgtactcctcagcacaacactgacactcagtatacttgcagggggcgcacttccctatctgcctgcttcagcgatctatgccgatgcggataccgcggttaccaacaagcagaactttagtacagacgtcatctatcagatctttacggaccgcttcctggacggaaatccttccaacaatcctaccggagctgcctacgatgccacttgtagtaacctgaagttgtattgcggaggcgactggcagggtttgatcaacaaaatcaacgataactattttagcgatctgggcgttacggcattgtggatctcccaaccggttgaaaatatctttgccacgatcaactacggcggcgtaatcaacacagcgtatcatggttactgggcacgtgatttcaagaagaccaatccgtatttcggaacgatggctgattttcaaaatctgattacaaccgctcatgccaaaggcatcaagatcgtcattgactttgcaccgaaccacacgtctcctgccatggagaccgatacctcctttgcagagaatggcaagttgtacgataatggtaatcttgttggcggatacacaaatgatacaaatggatatttccatcacaacggtggctccgatttttcctccctggagaatggtatctacaaaaacctctatgacctcgctgacctgaatcacaataacagtaccattgatcaatatttcaaagatgcaatcaagctatggctcgatatgggcgtggatggtattcgtgttgatgcggtgaaacatatgcctctcggctggcaaaagagctggatgtcctccatctatgcacataaacctgtattcacctttggtgaatggttcttgggatctgctgcatccgatgcggataacacggaatttgccaacgaatccgggatgagcctgcttgatttccgctttaactctgctgtgcgcgatgtcttccgggataacacatccaacatgtatgctctggattcgatgattacaggcacagcggcagattacaatcaggtgaatgaccaagtcacgttcatcgacaaccatgatatggatcgattcaaaacaagtgccgtcaacaatcgtcgtctggaacaggcgctggccttcacgctgacttcgcgcggcgtacctgctatctattatggtaccgagcagtatctgacaggtaacggggaccctgataaccgggccaaaatgccttccttctccaaaacaacgacggccttcaatgtgatcagcaagctggcccctcttcgcaaatccaatccggcgattgcgtacggctccactcaacaacgctggatcaataatgatgtgtatatctatgagcgcaaattcggcaaaagtgtagctgttgttgcggtgaaccgtaatctctccacaccagcaagcattgcaaatctaagcacttcactgccaactggcaactacaccgatgtactgggcggcgcactgaacggtaataacatcacttccaccaatggcaacgtctcttccttcacactggcagccggagcaaccgcggtctggcagtatacaacaagcgaaacaactccaacgatcggacatgtaggtccggtgatgggcaaaccgggtaatgtcgttaccattagtggacgtggatttggctccaccaaaggtaccgtatacttcggtacaacagccgttactggtgctgcgatcacatcctgggaagatacacagatcaaagtgacgatcccagcagttgcagcaggcaattatgctgtaaaagtagctgcgaatggcgtcaacagcaatgcgtataacaacttcaccatccttacgggtgatcaggtcactgtacgattcgtcattaacaatgcttccaccacactgggtcagaacatctatctgacaggtaatgtggcagaactcggcaactggagtacgggcacaacagctattggccctgctttcaatcaagttatccatgcctacccaacttggtactatgatgtgagcgtgccagccgggaaacaactggagttcaaattcttcaagaaaaatggggcaaccattacgtgggaaggtggttccaaccacacgttcaccacaccaaccagcggtacagccacagtcaatgtaaactggcaatagaatattcagtccacaagctaacccggagttacgctaacgcagcgtatgctccgggttttgctattggattatgctatataaattgaacaaatgatcgtgtaaatgtttatagttcaactaacatagattggatctatatctcacatttctaatgataggttcggatcgacttcaatgttgtcgctgccagaatacctgtcgccagcagtaatatgcccacgccttgcagcacagaagctgccccccactgatcagccaatacggagacaaccgtcaatcccagaatgggcgctgtactggtgattgttccaactacaccatagactcttccttgcagctcgtccggaacggctgtcctcagcataatctgggtgagcattgtacagcaggcgaacatcgcacctccgcccacgatgaacggtaacgccataattggggaggatacattcgccaaaaaaatataaagtggccctaatacaatcagaccgataaatacccatctccctcttcgcttcaatcgttttcccgaagcaatcaacagcgcagagccaatcatgtatcccagcggaatacaggtctcaattaatccaaactgcaccggattcgcctcccataccttgaccgccattacttgaaccagcatcatagctgacatgaaaaataagatcagcaccggattgagcaatacaatggatcgaatcagacgattccgatagatgtagccaaacgaactgcgccactcctgagcaaacgtggtctgctgactaacggatcgctgtacctcaggaaagcggcccgccatcagcacacagactgcggacaacagaaaggttgcccctgtaattaatatggcaacgaatccgccaaatgcagcaacagcaactcccgccgccgctagtccgctgattcgggcaagattatccaccatatgaatggttcccgtcgcttgttgaatatgctccctgcccaccatacttgctacagaggcgtggaatgcaggggcctgaaacaggcttgaaaacatggagagtgagagcaacagcagcaccaccggaaacggagcatgccaaccgaacaggctaatcgcaatcagcacagccatcacaccgcggaatacatccgaggccagcatcagcttcctgcgatccaatcggtctgcaaccgtacccgccaccgatccaaacagaaaactgacagccatattgcagatctgtacagctgccatgctctttgcactccctgtggtctgtaacacccacagactgatcgcaatcccattgaagcaatccccaaaaaccgagatgccatagccgtacaatatcctccgaaaggtaacattacgccatagtgttcgcggagctttggtattatgcaatgcagcttgtccatcttggtatccgataatctcgggctcactggacgggttcatgcccatacatcacgttcctccctaatcatgattagagcccatacagaactaggcacttccgcagctttgccagtcgacaaagacatgacatcacggaagtgcctggttgagtgccgcagggatcgcggctgactatgctgttatggcacaggattaccctttcgaagctcctgccgtcagaccctgaaccaggaatcgttgcaagaaaacgaacagcagtgtaattggaatagcaatcagtaccgcccccgcagcaaacatcgtaaagttactgtcctgataacggttgaccagatcccacatacccaccgcaagcgtccagttctctttcgtccgcagcaccagccgggcgaagataaagtccatccatgcccctgtaaaactggtcagcgctacataggtcagcattggcttggataagggcaagatgatactggtgaatactcgcaggtgactcgcaccatccatgcgcgccgcttcgtccagactgcgagggatggtgtcaaagaaacctttgacgataaatccgcccagtaccgcccctgaagaatagaccagaatgagcgcagcgtgggtgtcgagcaatttaatttgcagcaaaatgatatagattgcaatcatgctcatgaagcttgggaacatgccgaggatcagcatggtggagagaatcgttttacgtccacggaagcggaagcgggacaaggcatacatcccaagcgtaaccatcaacgtggagaagatcatcgtaaaaaaggcaattttcagcgtattcatataccatctgccgtacataaaggacgggttattaaacagctcaccgtaatgggtcaacgtgaatgcttccggccataaccgttcactgaacaatgccgcaccaggtctcagagaagagagaaagatccagagcaccgggtagatggagacaacggcgatgatcagcaatagcacataactcagggccaaacgcagcggattattacgtgtcttcattgaatcatgtcctcctctttgaatgatttggagcggcggaagttccagatagagaatgaagcgataataaggaagatgataatacctactgctgaagccatgttgaatttgttattgtcgagtgtgagcttgtagagccaggttaccagcaggtccgttgcccctgcgtactggtagtctccccgtaatggattcccgttggtcagtaggaagatgacattgaagttgttgaagtttccggcgaactgcatgataagtaccggagttgtggcaaaaagaatgaacggcatcgtaatgatccgaaacttctgaaacgcggatgctccgtccacttctgcagcctcgtagagatcacgaggaatggctgttaatacacccagaatcagcaccatactgaccggaataccgatccacatgttgacgacaataacggtaaccttggcccagaacggatctgtcagccagggtaatccctccagcccaaatgctctcatgtacgtattaattggaccaaactgaccattgaacagattacgcatgagcagcaaggagatgatctgcgggatggcataaggcagaataaaaatggtccgccacagctttttgaagcgtatgcccctctgttcaatcaacagtgccacaagtacgccgccaaaataggtggtgactgtagccaaaatggcccagatgaccgtccaagtgagtacaccgtagaatgtctggctccaggatttcaattgaatcagatcactgaacgtcttgaagcccacccagtccacgagtttggctggcggaatatgatccggggccgaatagttggtaaacgcgatcgtgatcgtaaacaggatgggcataacggtgaagaaaagaatacctagtgccgggatggacaggaacagatacggaaagtttttgtccatcatgttccgaagcgatgccgctgcacccagggtctgcttgccttcttccctcgcgagtcccgtgacgtacgcatcccggatattcaggatgtagatcagaataaacacaaaaaacaccagcagtacgataatgccatcaagcagcaaaaagatggaatggtctcccctttgaagtacagtagacccattcactttgacaaaacgctgtgtattttcccccagtgtccatatgccccatacggcctgtgacaggcgaggaagcaggtacgcaagccctgctccctccagtaacagtagacaaattcccttaatccattgtcgattgtacagctgtccaagaccttgcagtatgatggaacatatggccgctgtcatccgatgttgtctttccctgttcggtccaacgggcaccgggacatgctgctgttgcattcgctctctcctccccgcctagtgctaacctgtatacattgaacaaaagtgtccttacactgaccactccgatgacagaacaagcttccgatcggtgataaaggcgagcctatgcttccgaagtagctttctttcagaaagcttttagcttcacttcttcagctttcttctgtcctctaagtttttgtgtaaatatgaagttcaattatgcagctcttatgcatatcttcgcactcgtcgttcgtccttattggacggtggcaaggctttcctggatctgtttcacggcattgtccagcgatgccttcacgtccttatcggtatcccagatatccgtaatggccgacgtgatcggtccccatacgctgtccatggcaggaagcgaaggcattggggtcgagttgttgaactgttccaggaacgccttattgatcgggtcttcctgcaacttcggatcagcagctacgtttttgttcgcaggaagtgtaccgttcaggtcaaagttctccatctgagcttcttcattggaaaggaacgctgccaagagcttcgacgcattcgggtattgtgtaaatgcattcacataataggctttaacacctgagaaggaggtcatcggtttaccatcgattgccggaagcggagcaacgccaaaatcaatacctgcattgcgataatcggcaatggtccacggaccgttaatgtccatagccagcttgccgctggagaataatccttttttgatatcatagttcacgtcacccatcttaagcggcagcacttccgacttcagcgtctgtaagaactgtccacccttctgcgcaccttcgttattcagaccgagatccgcgctatccatcccgttgtctccaaaaatataaccgccctgtgaagccaggaacgcatagttatagtaaaattgctgcaattcccacatcagcgcatactgattggacttcacattattgaacgtcttggcgaaactgataatctcatcaaagttttttggagcttctggatagagtgccttgttatagaaaagggcgtaggtctccacgctgtacggatagccgtacaggatatccttgaacgtcaccgccttcaacgcgttgtcactggtgttctctgcggtctctgcttcgaatatgtcattgggcagaataagtcccgcctctgaagcgctaccaatcttatcatgtgggaaaacaacgacatctgccgccagacccgccgggccatccgtcgtcagcttggttacctgatcagttggaggtaattcctccattttgaccgttaccccatatttttcttcgaattttttgaccctttgctcaataaagctgctttgatttttatcctcccagatcaccagagttgccccttcttccggttgaaggttctcggatgtcagctctacaacttcctccggattctcacctgccgtagttggagatggacttccgcctccagccccgcacgcagccagtgtaaaagccatcatgacggacaatgttgccccttgccattttctcatgtaaaatgtccccttccctctgcttggtccaacaaagttcgcgcttttcacccttttgtctgcgtatgttgtcaggttttgcatcccatatcctcttttgtacaaacgtttgctcaaatggaagacaagatgacctctcggttcaatatgtaggggtaaacaagtcaagaagtatgtaaatccactgatgtaagcgctacaataacaatcacatcatacaataacgatctttatttgcacaaacgtttgcacaagccatatttgctcaattttaaccaatttccttcttctacctacagtaatttcctgtttccttgttctgactctttcttccttaatttcacttcacgtgcatcccttactcggcagttagcaattgatttctcgtatcctttggattaccataggagaatatttatacgattgttcagaagggatttttttacatgattacgatcaaggatattgccaaattggcgggtgtttccccttctacagtgtcacgggtgatttccaaccatcctagaatcagcaccaaaacgtctctcaaagtgaagcaaatcatgaaagaattaaactaccatcccaacatcatcgcgaagagcctggtttccaaaacaacacatacccttgggattatgcttccgcgtcctgcagaagagttgtttcaaaattactttttcggggaactgctccgaggtattattacacatgccacccgaatgaattatgaattgctgctaacaaccgaaacatcatcagacaatgaactgcatgcgatatcacgccttgtgcatggccgtagagttgatggtattttgttgcttgggtccaagcgagacgatcccatcatttcatttttggaggcggaaaagtttccttttgtgttaatcggtcgcagtgaagctcatccaaatgcccccatggtggataacgataatgtgcagaccgcttatgatgcgactcatcatctgatcgcccaaggacatacgcgaatcggatttgtcagcggtcctccggacattacgttatcgcatgatcgtatgttaggataccaaaaagcgcttgcccaagccgggctggatgcggatagtgattggattgtggaaggtgaatttctgcaggaaagtggattcagagcgatgtcgctgttcatgtccttgccggacagacccacagcaattgttgtcatcgatgacaacgtggcctttggggtattgagagctcttgccgagcttcattatctggtgcctgaagatatcagtgtggtcagttttaacaatattgcattatcggaactggcttctccacccttaagctctatcgacatcgggacttttcagcttggttatacagccgttcaggtattgttaaaaattcttagtggggaaccacagcttcataatccggtcattatcccccatcgtctgatcgtgcgtgaatcctcactcttttccaaaccaaggccaccctcagattgattcatttcgggtatccgtgtagtaatgcaaacgtttgtcctacatggaatatgatgctgttatccaccgtacgtagttgcataggtgcataggtgcaaaaaaaagaagccgcatatactcttgcggcttccttaattcacacactatttccgtactccatgcttggctgcacttcaatggattaataagagctccagcctgcatcagctgtaacgacagttccgttcacgaagctggactcgtcagatccaaggaacaaagccactttggcgatctcttcgctcgtcccgatgcgtgggttgattgccatcccaagctgttgccgccctgcaccgaaatggctaatacctgtcatggaggagctgatattggttgccacagcgcctggagcgatcgcattacagcgaatgccttgctcagcatacatgtaccctgtatttttggtgaagcccacgaccgcatgtttggacgccgtataggctgctcctgcacgtccgccgtgtaggccccctgccgaagcaatgttcacgataacacctttttgtttttccaggaagatcggcaatactttacgtgttgtccgcatcacactggttgtgttcacagcaaacaatctctcccacttctcatccgttatatcagctgccggctccataccatccataattcccgcattgttaattagaatatctactgtaccatatgtgctcaccgtcgtatcgatcagattttgcacatcttcttctttagccacattggccagaacgacaatcgcttctccgccctgtgctttaatatcattgactaccgcttgtgcggattcttcgttaatatccgatacgacgactttcgcgccttcttgagcatacaacgtggcaattgctttccccatacctgaaccagcacctgtaacaactgcaactttatcttgaagtttcattccatgtatcctcctttgtgtcttcgtttacaataagttaacaaacaaatgttcattaactcctctccttagtataataagtcatagcgtttcacttcaatcagtaaaagcttgtccagttgtacgttaaacaacactattaagcccgaatgtactttaattaataaagtgaactcgcgaggaggaaaatagatgtctgaaactatgaattcaatggaccgaagaatcaagaaatcaaaagctgcactgaaggatgcactcatccatttgatgcagaaacatccctttaaagaaatatcgattacagatattgtgcagcgagccgacctgaatcggggaactttctataggcattatcagtacaaagaagacctgttcaacgaaattatcgatgatgtgattcaggatctggtaacttctttccgcaaaccttatcaggatgaggaagagttcgaagtcaatctgatgccctcttcggcgatcactatatttgagcatgtacaccaacacgcacaattctacacactggttgtgaaatctgaggcctcctccaacttccagcgcatgatctgtgatgttcttcgggatctggccttacaggatctgaaccacatcttccctccacacatcaaccatgaaatattggcaagctaccaatctcatgcgatatttggcatgatcatggagtggatcagacaggatttcaagcacagcccggcctacatggctgaggagttgttcaagatcatccattacaagccagataatatcgtgttataaaactgaaattttgaatcatcttacttccctttagtagggtgattgagattaatttcaagaaagcttcccaccaaaattatataaatgtattcctgtaatctctggtaatgatatgttaggttatccaatggaatataacaaaaggaggatgacattacatttgaagaagtcgtggattatatcattgattaccagttttgttttgcttggcggagtgcttctctctccagccgcttctgctgatacagccaaagtagcaacctctacatattcagattcagatcagagttatgcagaatttaaagagtacactaatcagttatttgctcttgaaacttatgaggccaaagccttcacagctttggaaagcatcgacacccaggtaacttcaaccaatcgcaagtccatgtatcttaaacttacgaatacggtgatccccaattatacgaaattggtatccaaggcaaaacaaatcaagcctaccaacccgcaaatcaagaaaatccacaccacatttattaaggcaagttacactcagctcgaagggtacctgttgtaccaaaaggcagtatccaagaacaaagtgaattacacgttactaaaacaaggtaatgccaaagtaaacaccgctagtgttctaatggatcaatgcgaacaacagttatacgcttatgcaagaagcttggggtatgacagttagtacctatcttcatagaagccaaaaagcgaccattccccatgcttaatgaggaacggtcgcttcttctaattatagaaataaagataacaatataatgcgtatttatttctctctcttctgatcacagccccagcttctgccctttctccaaccgctgaatctgctgctctccggtatccgcaagttcacggaactggttaatcgtctcgcgcattcttggcagagcttcctgcttataaagactgatcgaatcgagtgctgacaacacatcggtaaacgcctgtttcatcgtatccacggagatgctggcttcatatgcctgcttctggatggcaatcccctgatccttgagcatcttggatgttccggcgatcagatcgttggttgtctggttcagcaactcaattttctgcaatacaatcttctgattatacaaagcgcttgctactgtaacggcaattttcaatgcagagatggttacattcttcgcacggtctacgcctcggatcagttccttattattgcggatgaccacttcaatcgccatgatgccctgctgattcacgaccagcatttgttgaagatccatgacccgctgacggagcggaaacagcacttcttccgtaataaatcggactttctcagggtcttcattgcggaccttggccgcttcgatctggccatcgatggactcatccataagcacgccaagctgaatctccttttgcagtcgtttggtgagttcccgcaggttctgctgttcaatctccagcgttgtattatcgttacgcagggtagatctgcctttatccaaagaggttacgatgtcagcgatgactgcgtcagccttctggtatttcaggaaataggcgcgaagcggattgaacaatttcccaaggaaaccgttcttggcaaagtcgaccacgcttgggtcgagatccttcagttgcatatgcagctcggtcaaacctttggcgacctgaccgccctcgtctcccgtcttggacagatgtccaacggagacttgaagcaaggcgtttttctcagaagaggatctcatcgtattcatgccaaagccgtcaatggattgcagaatttctttgcgcttctccagggattcgagatccagtgtcatgatcatctctacgttggcatttgccacttgttgaagctccgcgacctcggcgggcacgggcttcacttcttcttcgatcaccttctgaatttccttctggctcggtatttccattgaaaatgacatctacagttccccctttaaatacgtgctgtaaaatgattgatattccacgcgagtgactccgattgcagtaccctcctccgatcgctgttatccccagatttcttcattttcctcattaatcggttgaaatctggtgatagcgtatgcttccgaagcagctttctttcagaaagcttttaggcgaacgctacgcttcttcagatcggttctgcactctacgtcttcgtgttataaatttacatctgtacgttaaacaggttaccgatcttgtatacgacatcgtcggtatcggcattgatgcttgctgcttcgttaatgctggagatgctctccaaagccttgatgtccgcgttgtatccaatcgtatagattggcactttgtacgtctcgaccagatcacgaatatccttcagggtatgaccttcgttggtctcgccatcactcaggacaaagatcaacggcttcacgtttggattagcagccatataatcttccagcatcttcatcgccaccacgatcccgtcaaaggttgctgtaccgccgccagcttgcagactatcaactgtaccgacaaacatggactgctggttcgtatcatacttggcaatcggcagattcacggttaccccgctagagtaagaaaccaggccaatactattctcagtgcccaggtacttctgacctttgcgtagggactccttcagtcggttaagaggttcgccgtccatgcttccggacacgtctgtcacgaacacggcggcaattggtttactgccgtttttcttctctttccatactttctgtgcagacaacaacgtgccgccatccacggtagccagctcggatttgtaatcctgcaaaccgttgaagccaaactcttctgccgattgttggtacttcgcttgagttacgaattctgcgaacttttggatgatttcctgtttgttctgtggcaattgtcccaatgcatacagcgggctatcatgtctcacaccaaatggtgtaaagacgtatccactcttcagatcagcggtattcacatacgtctgatattcgagtacaaaggcatccagtctgcctgacttggcagcttcccgcatctgaatcgttgtcgatgctgtaaacggtacattcgtctggaatttttcgaacccttcaatggccttctcgccaagcgggttggcactgtcatacgtattcagtgcagtcaccaggaaattcagtcctgtggagctggcaaatggatcggtatatcccatcgcgagttcattgttggcaatcgcttcggttacggtttttacattaacggagccgtacgtatcaaccagtgcatcatatttggctttggagatgacaatacccggaacgttcccgaccaatcgctcggataccatctctgtcttcaccccactggcctcaaccatctcgccccatagttcattggaaggtgtgaatgcatccggcatatacttaccagacttgatataatcggtggccgtaccggaggcaatgttgcggattttgaccgatacctgtttcccaccaacggtaatgtttgctttgttgaattcctcgcccacttcggttaaccagccgtctaccccgctacccgacttctctggggaagagaagatttcgacgtaatcatttgttgtattctctacggcaattgcaaatttggagatatccggcagtgattctgccacatcgaccgggtcgagatcaatctgccctttgaccggttccgccgtcgctggcgcaatgtccgcgtacagttttcccagttccttacctgcattctctgtgctcacctgtgtggttgacttgccaaagttcgacgtcagtgtaattcctgcatagaccagaccaaatacgagcaccagcattacaatcgatatgaaaaaaaactttcccttcttggccatacgagcaacccctcactgtctgtataatttggtatgcttgattaactgatcaatctcctgcatacaaggcatctgttcaatatctccggcttcaaagctgtcgaggcgtgaaatctccaataacaactgatcgagcttgagcagaatttcctcattggtgtggagtgaatttttcacataagacagataatcgttgtataccttggttttctcctgaaaaagcttctggggaagtgttgaggatttggatttcatcatgttggcataatcagcttcatcgaatacattcaaccggttcagcacactgcgaatattcaggtataacaacttctccacttccagtgtgaccgaagcaaatttcttgtagctcaattcccccggatcaaaccgttgatgaagcacattcaggagggtttcttttttctttttcattcgactaagttgggacagccccagcgtaatatcttcttcgagaactttaatgcgtctataaaaagatagtgcctccacataatcttcatgcgtttcaatatgcttcacgggcagcactaccggttgtctgaacagcgaggtgtaacttccatacaagagtgccattgcactgccgaacagaagggtaacggatagcgcagttgtgaatgcaccctcctcgaaattcagcccgataaagccgggtgagaatgcgagaacattcacagccacaataccgaggattaatcccaacaattttatgtacttgatcatgttcaatcatccgacctcctttcatgttatatattggtgcttcatgtcgtaattttcctgttcaacttattcttattgtacatgatgttaacgctctcaggtggatatgattggatatttggatactcataatatacgtggtttgggcttatcccatttcatattttcagggacaacgtggaacttggcaggaaattttgtggtcaatccataaaaagtgagttatacgagacagcagattgtggagaagaaatgttatcaggtaatacgtggaaaatagctatgcgtgtcattttttatataagacttgtctgaaaaaggagcaaagcaaaaaggacgaatcggtgatcatccggtttcgtcccttttacgttggtgcattatttttcgtgttctttattaaaattttgatgccgtgttctacatctaacgaactgaggtgacgttattaggtacattccaactcttctgaaaatgtaacgaacctgagacacgttatgttcccgttttaggcgaaaagacgttgtttatcgcctatttcgaatgaaatataacatcgctgagattcgttacatttcccaactcacctaaattccctatataaggtgtgtgtgtggttcgttagaataaaaaaatggccgccttattgcttcgtctgtagtagacagattgacgcttcgcactacctgaacttgaacagcgaatccaaccgaattaccaattcaggatatataaccgattgaatcgtttcctgctctgtatatagatgacgggtctggtaactgccatcctccagcgtgtacacatggacggtttgattgccggggtcaacaatccagtattcgttcacaccatatttctgatacaagttaaatttttcgttaaaatcctttaacgcagtcgaaggtgataacacctcaataattaaagaaggcgcaccgtgacagccacttttggatatctggtctttggagcacactaccgataaatcaggctgtacaacttgatctggtaggtcatattgttcattttcgctaaaatacacatcaaaaggggaaacaaacacaaaacatttccgattctgaaaaaaagtccgtaaagagaagtgcagctcacccacaataaactggtgcgatgaagtaggcactggcgacatattaaaagctttgccgttaattaattcccatggtccttcccatgttaaccaatcctgaaagctataagtacctttattgtcgagttttgccacacttcgatcctcctcttccaactaaccgtaatttattttcattataacattgtgtttgcgccttttcacaccatgcctcttattatgaaaagatggattccggtttacttcgcgtggtgcgtacctctacaactttcccggcacatccattgtcgcccttcgcctggaacattaccgtaacgctgtctttgcctgatgtaaccgcctcaggaatatcgtaggtcacatagaacacttcgccaatcttgttcatatgaattcgctgctcaccgatgagtgttccatccacggtaatggcgaattgtctgtcatataacttaccttcccgtttaaacgcggaatgatctccgccccaataggccacacatagataattggttgcctcacgatccactgccagttggtaactgaagtaagccccactgacgccaaaagcttctcgccacatatgcaacttcttacggccatctgtggttgaaccgttgtggtgctccccacggcagttgctgtccagttgatgtccaatctcatcctgctgaccgtcagcctgaaccctgtcgatcgtgatatcgttcaactctttctccagcgcatctccttcatcgttaaacggccagtacacggtataaaattcgtgatgcacatcatagaacggaatgagcttcacggcttcgcctgtggaagtaacatctttgctaagttcaaatgttaacgtgtctgtatccacaaccttgatccactctcgtacatcatcctgctccgtccagatcacaggtacaggtgcagtcttgggatttagagctgtttcatccacgatcgtatcctccggaagaccctcgtttcctagtgcaccagcgagtactatcgggccgtacaggaatgccactttgtgggaatcatcccgggcagtgtactggcggagtgacatcggcagtgtgatggtgatgacatcgcccgttgtccatgtgcgctcgatggaaagatagccgggttccatccgtgtatacggatgttccgtatccccattgacggttgccgtcattggctgttgcagccatgagggcacgcgtaatcttagatgagccgaggcgttgcctccggtgatcgtcagggtcaccttttccgaataaggaaagtcggtttcgagcttcagggatattccctgagacgtccaatccagctgggaagcgatatacaggttgacgtacaggtcctgttcatcctcaaaatagatcgcctcggcatatttgcccgggttctccatacctgatcctgtgcagcaccaccaggcggtgtcgtgagtcccatagattttgtagtggccttgcagcgttgatgcaaaatacgttttgttccccgtatccgggtcctgcgtgccaaggatgtgattatagatggcgttttcataatagtccatgtaggcgctatcatgattccaggcaaagagttgcttcgttagatgtaacatgttgtgagtacaacagctctctcctgttttgatgcccagactctccataccctttgcttcgtaatgctctgaaatgctcgtcgcaccaaatacataagaacgatgatgcaccgtggtgttccagaaaaactctgccgctgtccgataactctcatgggtatggtcctggttgtagatttcggctgcaccgatcactttgggaatctgggtattggcgtgtttgccttgaagatcatcctgcttgtgctccaagggtctcaggatcaaatgatgagtgaacttgtcagcgatctcaagatataaggctttgcctgtgattccatacaaatgtgcaaatacttcattcatgcccccgtgttcactttgaagcattgtctgcatctgttcttctgtcatcgggagcaaaccttctaccgcccagtctgcaaatcgagtaactacatcaagtgcctgtcggttgccagtgagtttatacgcatcaatcaggccgcgatagattttgtgcacactgtaccagggaacccagtattcaccgatattgaatccaccgatattctctgctcgaaaagccatgtggaaaggttcttcggacaaaccaccgatatatccgcttcccgtggtctgctggattctcgccagttcggtgaccgcataatccagtctttcttttaacgtgatattcccggttgcctgatacgtcacagccagggcagacagataatgtccgagagaatgtccgctgatggtacgtgcctcccaacccgcgtagcgctcttttcgggcaggtaaaccatgcgcttcgaagcatggagccaggaatcgatcaatatccagtgataacaggtaacgctcccccacctcttgtgatgtttggaacacaccatttaacagatctacatgttccggtcccagaaatccttttttcgtatcaatcatgacactcactccttctcgggatgtaatagatatccattcattcttaaggggtaaaatccgtgttctgttccatatgactaatactcatcaatctactgtagagcttgaatatccccatactatcaaataaaatacaattacatcagactcataatccaagaaaaggtggataaatccgtcctatgcaaaagccactggaacattacctgtgcggcaagttcatatccgaaggcaactggagccacatgaaacgcagcatgcctgtgcatgagatcattttgatgctggaaggtgagatgtacatcgcggaggaagaggaacaatatgtagttcgtgccaacgatctgttgtttctgcgcgccggtcgcacccattacggctaccagattagcgacgcccccgtgagcttctactgggttcactatgatgccatttcggcagaattcaaccagtttaggacacatgccaccattcaggtaccttccatggccaatcagttattcaagcaattgctgcatgtgtcatccttctcaccagaagaagccgacgctgctttgttactgttgttcaaggagctggagcgcaatatagaggcggattatcgcccgcacaatgcaattgtggaccatatctgcaagtgggtcgatattcatctgcatacaaacatcacggtgagtcagattgcggaaaattttaattttaacaaagactatatctccaaaatggtgaagcgcgagaaaggtactggactcaaaacctatatcctcacagaacgtattcgccgggcgaaacaattgctgctcaacaccaatgccagtgtaaaagaaattgccggacagtgcggcttctccgactacaagctgttcctgcgcatgttcaagcaatacgaaggcaatacgccaaccgaatatcgcaatcatctgtattccacacagctcaatcgctgatgcgctatgatctatagaaatgactgagttacctatagaaaatttgaatgaatcggattgaatccgttatggtaaaatgcaagaaaactatattccatacttaacccataagagaagaggaattataagatgacaacggctgccgttacgattcaccctgccacagaagcagaccatccagagattgtagatatccttgttgcaagttatgccgagtatcgggagacttttgagcaaaatgaacgatgggaggcctacctaaaagatattcgagagtctgtggttaatccttacctgacgcaattatggatcgcgaagattgatgatcagattgtcggtacagtccaattattcgaaacagcacgcaacgcttatccaaactttgaattgccaatcgattatccgtttattcggctgctgggtgttgatccaaaatggagaggtcacgggattgccagagtattgctccagcaatgcgtagattctgccaaagagatgggcaaaaatacggtgtacttatatacgggcggtcagatggttaatgccatccgtttatatgagcgttttggatttacagaggataaggaattcagctccgagagtgacgggggcaaggcgatctgttaccgttatgattcctagtggagggtaacagcaacacgggatctgcgaacagagaatgaagtgtaaaaaagaccgatcatcttcatgacggtctgttttacgtttataaatgtcaactatataagttgcactaatcatttacacgataacggagaggacagaaaaaaactgaaaaagcgaagcgttcgcctttatccccggatttcccctcgagaaaagggaatggaaaaaaatctggggataacagcgattggaaggttattctgtcatcgtagtgtcagtgtaaataaattttagttcaacttatataacatttgaaataatacatcgctattgattttttacccgccaatctccaccaaaatcttcgcatggctcttgtcgctcattaacagctcaagcccttcctgcacgatatcgtccagtttgattttcttggtgatgacctgtttcacatcgagcgacccttccgcaatcaatgaaatcacttcagggaaaatgtggcgatatgccagcgttgccgttagattcgcttctttgaccagaagatcgaagaagttcacttgaagcggatttggaatcgctgcgatgacaacaacttctccgccttttttgacaaccgcaatggcgctatccatcgttggttgtacacctgctgcttcataagccacatcaataccgcccgattgttgcaagatcacctctgttgcattgactttggcactgttcaccggaatggctcccagtttggctgccaggtccagacgttcctcaaatacatcgactgcatagatttcagaggctcctgctgctttggcagacagaatggtcaataatccaattggacctgctccatatacggctactttgttccccactttcaacttgctgtgacgaaccgcgtgaaaggctactgccgtaggctctacgagcgcaccttcttcgaaagatacgttatccggtatgggatgaaccatgtatgcttcaacaacaacatactccgcaaaaccaccatcaccattcagtccaacgaatccaaattgagtacactggttgtaacgtccctgaatacagtactcacattttccgcaatggtacaacggctctaccacaactctatcccctacactgataccgcttacattacttcccaattcactcacggttcctgcaaattcatgacccaatgtcaacggtgctttctgtcctgagagcggatgattctcgccttcttgaattcctacaccatgatgataggcatgcaagtcactgccgcagatccccgcatattccactttgattttgacctgacccgcttgagcaaccggaacttcccgttcttctacacgaacgtctttatggccgtaccatactgctgctttcatgaagttcatcccctttgtatgattgtctatatattatatcgctgttcatgtattattcatatttatagatactaatgttaacattagttgtattaatgctaaacggagatgaaatcatgaatctggaacagctcgaatatgtcgttgaaattgcgaaaacgcagtcattctccgccgcctcggaacatctacatgtcactcaatcggcgatcagccaatcggtgcatcgtctggagaaagaattgggtatcatcctgttcgaacgctcgcggcagggtactcaccccactcccgaaggcaaacaattcattgccaaggcactggacattttgcagcggattgatgaattgaaatccctgaacgccgaagcctcctctcttagcggagagcttcatgtggctacttttccaagtgtcatgccctatcttgtccagtctgctgcagatatgaagcgtgagcacccgcaacttaacatttccattgaagagaaagggtccatggaaattatcgaagatattcgcaataacaaaacccatctgggctttatcgcgatctatgcgaaacaattgcgggaattcgatggacttcacttcagtcccatgtactcgggtaagctggtcgtcggtactcatcacctgtctgaacttgccaagcacagccgcgttacaccggatcaattaaaagaacacaagctggcactgtatcgagatggtttcatcgaagacttcatcaaggaattcacctatgatcatggacctctgtccattctgtttaaaacgaataattcagaagccatcaacatggtgttaagaaacgatattgccgccacgattggtcacgacttttcctttcaccaaaatcccttatggaaagaaggtctggtgaagatggtagagatcgctggaatcgatcaaccgaaaatgcagattggcttcgtgcagacggagtccaaggagtccgccgtagctgcagaacgattcgcccaacgcttcagacaggcgatagagctggatcatttaaaagtttaaatctaaaaaagtgctccaccctttgaaggaagtttgggatgaacaccaacttctccaagagtggaacacttttctgactatctcttgcgttactattactacaccttactcaaactatactttaactttacgtacagcttcactcatctcgttcgtctgctgctccagcatggtggaggtctgtgccaccctgttgaacatggccgactgttcgcgcattaagcgatagatttcatccgaatgatccgacaccccggctgagatctgcgagatcgtattgacggaggctgcggcctcttccgaacctgccgagatttcctctgccgcagcggagacttcctgaatgcgactggttaccagttggaacgcgtcaactacatgagcgaaagcttgctccgcttctgcggtaattgtaaccccttgtccaatctcggttgcagtaacccccatctgtgagccaatctgctgtgattcttgttgaatacgaagcagcaagtcggagatccgttccatggatgtgcttgaggcctcagcaagcttccgaacttcatccgccacaaccgcaaaacctttgccgtgttctcctgcatgtgctgcctctatggatgcattaagcgcaagtagcttcgtctgactcgcaaagtcacgaaccgtgtgcagggcaccaccaatttcctgggagtagttgttcagcacctgaaccatcgctacaacttcacttgagacatttgagatgctctccatctgtgttttcatcagtgtcatgctctgtttaccagactccgccgtagaaagcgcacttgatgccgcatccgatacaaccatcgaggattcggatatatccgttatgccttttgcgatctcttccatcgcatgcgcgctatcgcttgcaccctgcttctgcgtatgtgcaccctgcctaatctgttcgacagattgatcaaccgtcttgcccatctcaagcatctcttcggtactgcgattaaattccttcgttgattccgataaaatatctgtggttactgctacgccttcaaccatgttactcacaatcttattcaagttaccggacatatgtatcatcgcttgatatgttgttccaatctcatcttggctgcgcaaacgatacgaagtcaaaatttgattcgcttctgcaagctcaccctgtgccattttttccacactcgccttcagcggttgaagtggtcgcagtcctcttacgataaaccacgtgacaacagcaatgcctataagtgtaatcagtagcaataaggcatagaagggaatactcgatttcattatatctgactcaatacttccgatcaccgataccgccgtatcgatcccaattacacctgttacagcgccgttactatccagcatgggagcgtatgaggaaatatagtcgccgtactcctcattgttaataattgaagaactggctgtttgcccctgcatcagcttctgcacagcctcgtgagggacatccgtgacttcattaatcggtgaggctttatctgcatccttcataccgtccaccataataagtggcgtacctttgtcatctattttgacgaaatacacatacattgcaccaatgcttacgcgaaagtcatccagttcatcacgaatcttcaagaattcgtcattctccttggggtccttggcaaactcggcataagatgctgtatccagctgattcacataactctgagcaatctggatgttgtaactcgaaatggcctcctgtgcagctagtttcatattggccacctgtaacagcatacttccaacggctataatcgtaatgaccagtgtgactactgcaacaatgcgcacaaccaaacgttttctaaaaaaaccaatcatccgctcctcttcctctcccgtgaacccaagcctttttgactaggcgctacccaaaaaacgcatgcttgaagcactatgtatgggaaaatagtaaacgaatatgtcgaattaggcaagaaaatattgggtttacataaaaacgctatcatggccgtggtagctttgttcattggatcagtattaggagttttgtgtatacactattgagttaatagggatctcggattggcttattaatttaccaacacatataccaatgctttttttattcattaacgaacttgagatttgtattgaaaccacttctattgaaaattctttattgtcgggtgttcgtacaaaaatataattattgattcgctttttaatttgatcatggctcaaattatcaagatcaggattgattcccactaaaatagttccatattctgatgattcaaaaatatctccaacattcattaatttatacatatttacaatcccttctccttctatctatgttgaatataaagtccgttttttacatcctttacacggagatctgcatttttcaatctcgtaatcgcatctctgagtagtgtcattctctctatagaagttaactctggggcaaatctcgctgctcttatactggcttgtgcttcgtccaacgcaaaatttcgcgcatacgttgcatcatcaagattatataattcgaaagctcttccgctattaaacgcttcataatgtccaataatctcatgagctatagtactatcccactgcctttaaatttcgaataactgttgtttcaagatgttattcatctgaaaaacctgattctgagctattgcaaattgtttcgaaacagatatcaactgttcaggcaaatataacaaaaacagaggttctagttccgaaataaaaccattaccttactaaatacaaaaaacaccccggcgcaagcgccgagatgtcatgttgttctatatttgcatactacccattcatactaaactgttcgtccattcgtcttcctaaatcgaatcagggaccagataatcagcaacgcgagcacggcaagacagatgctaatgctgaaccgattcccttcatcaaacacaaacatcaccgcaatcacactgagacatagtacaacgactccggttatgtaagggaatccccaaactttgaaggtcggttgaaccggatatctcttccgtagtttcagctgtgatgaagcaatacagatccacacaaggattacaacaaaccccggaactgcgagcaatacgcggaacagttgatcctgcgcgaacaggcctagcaaggaacctccgagcaaaactactgaacacaccagaagtgtgttaacagggctaccgttgcgattcgtctgtgacaatgccttcggagcttccccgcccactgccatggagtgcatcatccgggatgcaccatagatacctgaattcgcagcagacagaactgccgtcaccaaaataaagttcattatgtgtgctgctcccggcagtcccgtggatgcaagcacctgtacaaatggactgctctccggcccgatctcattccatgggataagaccacagatgatgagaatcggcaaggtgaagaacagaataattctgagcatgaaattgcccacgattttgggcataactttttctgcattttccgtctcggtcagggtcagaccaatcagctccgatcccccataagagaacatgaccacaagcagtgccgagaagatcgatgaccatccgttcgggaagaacccgcctgcttgcgtataattttgcagataaggggtgttatcacttgggataatgccaaagatcaaccctgcacccaggaagataaaaataatgatcatggcaattttgatcccggccagccaaaactcaaattccccgaacacacctacacttaacagattaaccagtataatgaacgccgcacaagccagactcagcatccacagcggtacttcactgaaccaatactgcaaaaagctcccggcggcaatcacctcaatgacacacaccgataaccatagaaaacagtacatccatcccataacaaaggatactctgctaccaaatgcctcctgcacgaagtctttcatatttttgttcttgtacaccgtagccatctccgccatcgcggccataacaaccagcagcaataatccggcaaaaatgtaagtgacaataacgcccggacctgcgagtccaatcgtctctgcactgcctttgaaaattcctgttccaatgacaccacccatagccataaaactgatgtgtcttggtttaagcctcttctgtagtgttccttctgtctgagccaattcaagtcctcctgatgtaaaaaacgtctgtaatgctgtcatatttcatagacataatgtccagtataccctattgtccatcaatcagcccagaagttccttatggccaattcatcccaaacatatatggacataacctatgttttataccccacaatggcacgaagcaatctatgtacaatccaggttagcaaaatgtaccctgccccatagatgaaccaagcgcctatgttactaccccatgttgaaagatcactcgcgatatacaacaaaggcagcataaaagaaataaccagcgctacccagagtctaaacgaattggcaaaataactgcatactccaagcaccacagcaatgatgggacataacaccaagacagcaaacagcggattcataaaatcaaaccaccagtaaaccatgcacgactccctccacattcttcgtcacaaggccacgttgctttaatgctgtattattgagtttattctactcttttttcatctcttaaaatgtacgatatgttgcaaaataaaaaaaccagcatcctgtaaacaacagaattctggtttctcatgcgattccacttagattgtttttgtcataaacgtgctgttcgggtccaatatataatctgcgaatggttcgcaatattcaaatccgaagtcttcgtacatcttccttgccgggataaatgaatccattgaacccgtctccagactgattcgcttataaccacgttctactgcaacgtccataatatgggccaaaatttttctcgctacgccttttctcagatgagccgaagcggtacgcatcgattttaactctgcatgctctgaatcaagttctttgatggctccgcagcctagcaaatcgtccccttcccaagcacaccagaaagtaatttcgggcttcttgagtccatccagattcaacgcatgaatactctctggaggcgaatctgccgccatcccttgcaagtgctccgcaattaaagccttaacttggaccccactcaaatcatccactttgatctccataacgtaccactcccgccgacatttttattggttttatcactgaatgtatatcaatcatttcatcttactaccgtgttaggttttgtgacaagaggttacttatatccactgaaatacgctattgtgattcacctgtaatttccagtatgatgaggctatcagatgccaaaggggcgaggtctattgcgaaatatacatagagttaaacgcggaactatggtgaagcaagcttaacttaatttaaaggagacccctatgacactaactacggacaacctgttttatagcaaacgtttaaagatgacgcccccacgtcctgaagacgtgcagaccatgctgcaatggaacgaagacccggagtaccttcggaatgtggatactgatctggccattccctattcagagaaacagttggaagatgagggcgaaacgaagaacaaggaagtttacttcagactgcgcacgcatgaagaggatacgctgattggttttgtcgtcattcacagtattgaatggaacaaccgctgcggacagcttgccattggcatcggacttgccaaacatcgcaacaagggatatggcacggaagcgttgaatcttattttacgatatgcgtttcatgagatgaatctggaccgggttggccttgatgtcatcgcctacaatgccaaagcaatccgttcctatgagaaggttggttttcagttggaaggtcgggcacgctcagctgtatttcgtgatggtaagcgttacgaccgtttaatgatgggaatcctaagaccagaatgggaaacacacaatcagatccatacggagggtgaacaagtatgaccaagaatgcggaagttactgcgtttattgaacagattcagatcccctggcaagtacaagtcgctgaacaattgcgccagtgggtgcatgataccatccctgacgtacaagaacgcgtgcaatacaaaaaacctcattttttgaaaaacggaaagtacgctgcggtcatctcgccatccaaacaagccatgtccttcaccatcttcaatgcaactggacttgatctccccgatgggatatttgaaggcccggaagaacgaaaaacgatcaaactcaaggaaaaagatacgccggactatgaatggttggcgggattgctgaagcaggcatctgcggaattgtagacgggtgtagtgaagaggcaaatacgccgaagtagtaacttaggtagtaatgtgcggaacgtatggtgtcggccgtaatgtgcgggtagtgtgtggggtgagtttaggtttgggccaagcgctaacgaatcggacacaccttatgtcgcatttaaacaggcatatgaaattctaacgaatctcagcagtcttattacagacaaagcctttgaattgcttcataaaaccttgccaatagaagtaataacgcggctacgatttgttagaattctacagtgctgcaaattcacccaataagatgtgataggttcgttagattttgtgagtatgacaagctgcttctgcacgtagaaaaaacaacccattctcactctggtggctaaataaataacataaccaactaactgtaacagatagcccctatccatcctgcgcagggcaaacaaaggggcatcccgtaagttcaagaacttacgggatgcccctttgttatagtctatctactactgtcattccaaccttaacagcagtgtaatattataataagatgactgcttatacttgcttataatggtttatactagcttccaccatcaagattgctggtacgatacggcggtcatctgacacggctcacatatgaacatgtaatacataccctcaccatatttctcaacctcgccccagtccagttgtgcgacagccttcattttcgcggaacagcgtggacatgttgggtactccgcatcttgaacccatcccggatggccgccgacctgagataacgatggctccatctcccactcactggcatggaatgcatgacgcgatgcattcgcaatccgaaactgctggccaacatccggtgcaagtttaccatagtcgtccaggtcaatctcgtccattcccgcaggcacgacattatgtgaactccataacggttcccctgccgcgtccatctccatgtaaaccacaccgtaactgctgcatatcacgcaagtctgtatctgaagtcgctgggcatgccaagaaacgcccttcaaagcgggatgtttaacatccagactaattaaggtggttaacgcactgccacaccatggacagccattgttgctagggttcagcatcaagagtgaatttctggtcaactccacgttaggtccttcattctcttttactttatagagtgaataacttggggtgatgaataattccctgcgctgcccgtcttttgtaagctcccaaccagcttcagtggtgtaatgctcaggtgccacgtataactcgttcgcccaagatggaggagattgtctccactgccggaactgctgcacaacaacatcatcaccgatatgggccagcatgagcaatatgtggttccgattctcatcatcggtatccacctgctgcaagagatgatcacgagcctcacccgaggcacttttatacaaaatggcaggataatagatctcctgttccagcagctcaggaatttcggcagtcaacgatatatcatggcagcagaccagatataccagaatgtctttgcccgtatcttcatcacctgtacgaatccgttgcatcgcgtaatccttcatctgatcttgttgctctacagacaaagatagatatacctgttcctcggattgttcatagggcgtataacgaattagtggatcgcgaacctgaggtttgtgcatgattttcaaaatttcgaccgggtctgtgatacctgcatacaagttcacgtcacgtcgattcgcttcaatgtatctctggcgctcctcgcgttccatctcttgcttgcaaggcatgcaataaccacccgttttcaacgctgttgctggtaaaatggtatttgcacacccctcccgtatacacggaattcgttctgtcatattccaacctccttcaactattggcaatggaaaacacgccacaatgtgacgtgcttgtcccttactcatatttcaatacctgcgtgtctcataaaggaaaatgcgaatcagtgatgtcccaactggtccttggtgaattcgtaaaaagcaagcgcatcttcactgctggcaaagcctgcctgagccatcttttcactaccgccacctttgccttggtatgctccaagattacctttaaagaaaggtccacaagcccattcaggcggttggccgttctgtgccagaactactttggcctccgagatgctcacaaagagtacaagcccctcatggtctgccgtcagcttggtagccaggctctgcatatccttaagcgatttgtcttcaaagacctgagcaatcaccagcccttgccgagcggccagaagttcctccgcaaaataggcatcattggttgttttcactgcattcagctcggtttgtagctgtttttgctccagttccattttctcaatacgttccaataattcgtccttgctggtctttaatttaaccatgatgctgttgagcacgttttgtgtagctgtgaattcattcagggctcttgttccacatttgaaataaatgcgggtgccgcccttcactttttcagttttcaacagtttgatgatcccaatctcacccgtcgccgacacatgcgttccgccgcaggcgttatactccacaccctcaatctcgacgatgcggatatcttccgttaccgtaggctgcttcaccaatggtaactgtgcagcctcttctgctgtaacccaggacgtattgatgcgagcgttacgatagatctgacgattcacttcttgttcaatggcggttaattgattcgctcccagttcggccgcagccacatcaatcgtgtcatactccgtaccaagatggaaactgagggtcatcgcttcagtaagctttagcgtgattgccgataacaaatgctgacccgtatgctgctgcatatgatcgaatctgcgctcccagtcaatctcacaatgtacctcagtctgttcagaggcgcgttccagcttatgccatacgtcaccatcttcaatgttcacatccagaacagcgatgccaccaatttgtcccagatcacaaggctgtccgcccccatgcgggtaaaaagcagtctccgccagcgtgacatatacaccgtcttccttgtctactctgtctgtaatcgttgtatgccactctcttgtataagcagagtcataatagattttttgcgtcattgaatcatcccgatcccttctcgttcaaatggttttttaccgatctgcacctaacctccagattacactatctggaactgcgaatccaatttaaggcacacaagatcgctcctccatatcaaaaagaccgctctgtaagccaagctacagagcggtcccttacttatatccacgtttaatgtaacgttggatatggtttgagctatgattacaccggaacggagattgcagacatattacttattatagacacaagagcgaagcagacagaaaggacctgaagaagcgaagcgtgctcctttatcaccggatttctaccttcaggggaaaaatcattaaaatccggggataagagagatcgaaaggttttctgtctgtgtagttcctgagtgtcaaatcaagtatggtctgcaatcggaatggtcaagtgtaatcctaggtgcattccatgtctttttttacattaaaccaaattccagaacagggcggtattcgccaccgtaaccatcgtgaacaataatgtgttcacaaatgcggcgagccatacattattcgttttttcaaacaatttgcgtgcatacacggcagcgatgatgagacaaggcaccagtgcaaagagcaaaatgccattcaatgcctgacctggatacaacgccacacctgtcataaagtctttgccgtattgtaccagcaaccacagcaccaacccgccaacattcagtacaatcgtcagtaacgttccgccacgtttaccgcgtgtgttggcattcagagcaactgcactgacaaagtaataaatcaggaagaacggtgtataccgtaaggcggtaatgaagtgttcactctcgaacgtacggaccgcaaacgtccagatccggaaatctgttccgaagatcgcctgcactacaaacagcaatgcgtatccgatgactactgcgagcaccgcggtcaccaagctggcaatgatcgtaacaggattcaagctgataccataatcgctgaaacgggttcctgcatcctttttagagaaataatggaaggcaaaggtcaccaggatcataattaacgccgataccaacgcccaatacacaatctggttcgttgttggttcattgaagtacgaacttgtaaccacaatcttatctgcatagttgaagatgatccacatcaccagagatacgatagccataattacgctgcctaccgcaatatttttcatccggcggcttgatgtatagtcgttcttcttgcttccagccatcacgagcccaataatggccccaagcacactcacggcaagtacaatcagagcgatgatgcgaagcacattcaatccattcgcttctttatccatcaaggttgggaatagaatcgctggaatcagggtgctgaatgcgatagcgagccaatagattgatttttgtttcccactgactgctgcggacaccgttgcaatctctcccgttaccgttttgcgcaagaacggcagtctgatcaacaacgtaatcagcggcacaatcatcaagaagaatccaatcagagcgacaaagttaaatgcctctttcgcccaccagatctgattgcccgaatccagattcacattggtctgattaggcgacgtcacaccattaaatgcatgtgcatagaagtcgattagatgcccagttgttgtacgcgagaaatggttccatgggtgagtctgattaggcgtaaacagaatatgctcacccgtttgggaaggacgtaccacttttccgtctacggtcagatcgccggatggtactttggtaaatgtatcggtcgtgcctcttggcgcatcaggagcaaggccaaggaaggctttacccgaagccgttgctgcaaaatccttgcgagtcaccgtaccttgtacttctttctctgcggctgttttctcttcatccgatttgttgaagaaaaactcgtcatatttccccgcgaccatgcccaccgtccgactgccaaatgcagcctgaagctgatcctgtggcgcaaccgccgcagcgtaagagtaatccgcacctgctgagatgcctgtgtagatcatacggtatcctgtttgaagggaactcatctcgtccatgtacattgacaacagcgttgagaacccacccatggagtgaccgctgactgccacgtaggcattgcctttctcatctttcttggtgaagtcctgctcataaatatatttggctgcatcaaactgcgagtatatccagaacgttccgaacagatcctttaccggaatatctgcactccagcgggaatccccgtggtcatacatgtccagtgcaagcacaatatagccgcgtcgggacatctcaatagcaggtgcatcctgcatttctttcgtattcagatatccatgtgttgtaataatgaccggacgtttatcatccgcacctgcccctttaggcatgtagagcagacccgatagcgtgccatgatcggcttggaatttgatctctttgaccttaacggaataaaaggaagagttgaacattccagcaaacaagctgccgaaaatgaccaaaatgagtgataaaaccaacaacccctgcggtttttttaagaatgatgtgactgttctcataaaggtccccttaataaatataaaatactagataaatgaatgtataatagtgcattgtagatacgtccaaagagctattcaaattagatgtaaatgataacatgtaaaaattgacttagtatggcctaaaaaaggcacacataacggcgccggacgtccggcgccattacctgtgtcacttgctgcatagtagcttaacgtttgctgactcaatctctatacctgtctaatgaatgacgctgggcaaacccgtgaccaatcttatttcatcgactcggataattctgtgaaaataacacccagcgcatacgcgccagcatccgggtagcccagactacgatcgccgacggcacctgcacgtcccatacgtgccacgatgtcttccgttttcttcgcaccttcaacggctgctgctgcacctttggcaaatgctgttttgaagtcatcgccagactccgcgctttgtgtccaggaatcggcacacggaacgagtgcatcgatcaaggttttatcacctacaacggcgccacgtccgaaggaacgttctcctgtagactgaatcccttgtacggctgcatggatcatctcagcaaattcagcaacgtttaattgctgtttatcccctactgctttgccagctgcacggaatgctgaaccccagatcgggccggatgcgccgccacaatattccatgatgaccaaggaacatgcatcgaggaatgatccgatgtcttttttatcttcgttaatgatgtgattccattcgcgtttcaactggcggaagccttttgccacactcataccgaaatcgccatcaccggcatgggaatccagttcacagaacggtacctcgttcttgatgatgatctcgcccattttatcgatcagatagacgacattgttcagtgaaaattgattgcctttgatgaccgcagctgatgcatccgtctccacttcgtaagatacgggagcatcttcacccacaacagcttccagcgcttcggaatacgccacttgtgctgctggagggccggatactttaaatgcaggtgtatcactttccttgaacaacagcgtttttagttcatcatccagtttcaggatcgtaaccgacgcacccgccatatcgatacttgtcatgtagttgcctacaaacgtagtagcgaccttcagacctgcatgtccagcaagctcacgctgaacggaattgttgagcagatacagttcttgcagtggtgttgcaccaaaaccattcacgagcaccgcaatctcagcggatgcatccttatccagcttcatatctgcgagcaatgcttcgaccatacgtcctgccaactcatccgctgataccaatttctcacggcgaatccctggctcaccatgaatccctacgccaaattccatctcatcttcagcaatttcgaatgtaggcgtgcctttggcgggcaccgtacaggatgtgaatccaaaaccaatactgcgcacgttctgagctgctttctcagcaacggatttcacatctgccagactgcggccttcttcggctgctgctccggcaatcttgtgaaccagtacagttccggcaacaccgcgacgtccaacggtatacaaactgtcttgtacagcgatgtcatcctcaacacgcacatactgtacgtcgatgccatcttcttcagccagatgcgctgcatttttgaagttcatcatgtcgccgctgtagttcttgatgatcaggagtgtacccttgttgctggctgttgccttgatcgcttgatatacctggatttgggaaggagatgcgaatacatctccacacaccgctgcatccagcatccctttaccgacataaccagcgtgagccggttcatgtccgctgccgccgccactgatcagactgactttatcagcctgaatctctctgcgtttaatgactttatattttttcagaaattcaagctccgggtgtgcaagcgcaatcccgttgcacatttccataacaacatgttcggcctggttaataattttcttcattattttacctcccggcgagctgctttgtactcacggcccatgcggtcagccgctgcaatggcagcagctacttcaggaacggtgattgggaacggcatggcgtgaatggattcttccggaatacaagcgatctctgccactttcaacagttcttcctgactaatcgtatctacaccgatatccgccaagctgatcggcagtcccacttcaagacagaagtccatgacttcatgcagctcttcggttggtgcattttcaaggacgagctgtgcgattgtaccgaaggatactttttcaccgtggaagaaatgatgtgtgccttccagaacagtcaaaccgttgtggattgcatgtgctgcggccagtccgccactttcgaatccgagacctgacagcagaatgttggtctcaacgatgttttccaaggcttgtgtcacaacgttgctgtcactcgctactttcgcttttgcaccatcagtcagcagcatttcataacacaattttgccaatgcaagtgccgcattcgtacctactgcagatggggtatatccttcgcgggaacccattggcagacttgcgtttacacgggaataagatttcgctgttgctcttgcttcgaagtatgtagagagcgcatctcccataccggatacgaggaaacgtgttggtgcattagcaattaccgttgtatcaacgagtaccacacttgggctttgtttgaagtaagcatagtcatcgaaagaaccatccggtgtgtacaatacagcggagtgacttgtcggtgcgtctgttgccgcaatcgttgggcagatgatcagtgcttcgccttctgctacacatttggccgcatcaatggctttaccaccaccaagaccgatggtagagtcacatcctttttccttcgcgatcgcttgcagacgagcaacttcctcacgggaacattcccctttaaaaccgctttcaacaaacgtaatattaaatttctcagctgttgcatccagctttgctttgacacgctgtacatcatctggatgtgcaatcagcaaagcagattctccgaaggatttaacaaagtaccccaggttcaacaactcgtcttcgccttgtacatatttggttgggctgataaatgcttttctcataatattatatgcctcctaatgatatgaattggtttagtgattacatcaaattttaatttcttacaattgaccttaatataacgcatgagcaacaggtttacagtggactttgataacaaattattataatttacaatcgtaattttttgctttttggcgcaatcatggtatcttattgtcatgagatggttgaattttgacctcccattatacattacccgtcatcattacatcttaatatgtacaacttgctaacttttaacggcctaaattatgaatcaggttagcctatggaggttgcaccaatgatcaaagaatatctgcatatcaataaaattctcgaccttaataaatggaagcgtctacaagattctctcgcaacagtaaccaaactggcgatcctcaccgttgattataaaggcattcccgtaaccagtcacagcagctgtcaggctttctgccagaatgtacgtaaagaccccgagctgctcccctactgccaaaaatgtgattcacgcggtggtctggaagccgttcggttgaatgaaccttatgtgtatttatgccatttcaatattatagatatcgcgattccgatcacgattgatggcaaatatatcggcgccgtcatggcaggacaagtgaaactcgccgatccggaaaagggtagcgacttggagcaaattgtcacgtccaaaaacgtacccatgcatgcagccaagctggaggaattaaaggatgattacgcccagctacctgtgatgacctatgaagagattgtgaaaatctctaacatgttatccctgctctgcaactacattgtggaagaagcgctaaacaaaaatctgttagttgaaatgttcgagaaagcttcaggcaatcaggagactctaaacctctccaccattctgccgggttactccattcgtaatatcgagtcgatcaaaaaagaaatgactaatgcgatagcggatgcttatctgaagaacagcccaagtgacacggaaagctccagtccggtacttcagcctgcttttgaatacattcacagtcacaagagtgaacaagtttcactcaaacaaatggccgatctatgccacctgagtccgagttatttcagcagactgtttgccaaggaaacgggtgaaaacttcacaacctacctggctaaactcaagattaagtgggccaaacaattgctggaggtcaccgacatgcctgtctcacagatcagtgatgagctgggatttaatgaatcgggatattttatcaaaatattcaaaaagttcgaggaaattacgcctgctctctatcgcaaatacctccaagagaaaatataggttcactgatacttttttcgtatcaaagatgaggttaaaagatatttcacctattaatctgccattgttacaatggagtccagatgacttagggaggcgacatgaatggaatatcgcaaattaggaaacagtggattaaccgtcagtgagatttcactcggcaactggattacgcatggagcgcaagtcgaggatggaatagcagaagcttgtgtgcgaaccgcattggatgcaggtattaccacatttgataccgcagatgtgtactccaataccaaggcagagtccgtactgggacaggctcttaaggatatacgaagagaaagtattgaactatgcaccaaagtctgtcacccaaccggcacaggtcataatgaccgcggactttcacgtaaacacatcatggaagcctgcaatggttcattacggcggctacagacggattatatcgatgtctattacgctcaccgttatgattacaacactccgctggaagagacgtttctggcattctccgatttggtgcgtcagggcaaagtccattacattggcgtaagtgaatggaacgcagatcagattgcacgaggagccgctttggcgcgggaacttcatgtccccttcattgcaagtcagccgcaatattcaatgttatggcgtgtgattgagcaagaagtggtgcctgcaagcgaccaagcaggacttggacagattacatggtctcctcttgctcagggtatattatcaggcaaatatgcgcctaacgcagcattgcccaccggatctcgcgcagctgctgaggcaggagcaccctttttcaataaactggctggacagtggttacgtgaagatgttcttaccgctgtgcaacagcttgttccactcgctaaagagattggtctaactctcccccaactcgctgtggcgtgggttcttcagcatacgtatgtcagttccgtcattatcggtgcatcccggccagagcaggtacttgaaaatgtaaaagcttctggtgtgaaactggaccctgcgatcatgactcgtattgatgaaatattgaatccatggattgagcgtgatccagccaagacgggttaaacacattcatcaacaaagttcataaaacgtgataccacttcctgattcatatccgtccgccatgccgtgtacaacggtacggagggcggattttcttctaatggaagaaagactacacccttacgctggaacacatccaccgatgacgggacaatggaaatgcccatgcccgccgcaacgagattcacaatcgtatacatctggatcgcttcctgcgtaattcgaggatctacgccatgctccctgcaataatccagaacgagacgatggaacggggaacccagatgccttgggaataaaataaaatcttcatccgccagttctcgaattgaaacttgagtctgagaagccttcgggtgatgatctggcaatacagcaatcaacgtttccatctggcaggggcggaacgagacatgacgagtatcttcctgatatcgcaaaaatccaatatggatctgtccgtcttccagtgcctgcaattgttgggatgaagtcatctcacgcagcgtcaattcaatctgaggatacgcagcgcgaaatttcctaagaacatccaccataatgctccccgaagccgaatccacaaaggctatggttatatgcccgatgatgccctgatctgctttttgcgtaagctgaatggatcgttcgagctgggccatgattagcctggcctgttccagaaataccgcacctgccggggtgagacgaaccatttttctggtgcgctccaacaacttcacgccaagctcatcctctaaattctgaatctgctggctcagcggtggttgcgtcatatttaatttttccgctgcacggtgaaaatgaagttcttctgccacggtgataaagtatcttaacttccgaatatccataagccaattgcgcatccttccgtctaccttgttaattcatctgttcctgaacccagattgccgactcagccagcatcgtcatcaattcattaaagtccacagcaatttcccgcagaggagtttcccctgcatcgtggatcaacatcagcaccttgcttgaattttgatccagtatagccatacttccttcaccaaatccaccaatcgggaaaggctggaggtcagctggcagctcgtattctttctcatattcacggtatacttccaaaaaatccggataagcccagctcagttctttcaccgaatacaaggcagggtcgccgaaattacatgcaccgaattcaagcaaaagtgcgcgatatgctgcgggcagttttacattatgcttttgttcaaaatcctcaatgctctgttgcgtttcaggagtacacccttctcccattgttgtatcgtaggcttttaccaaaagatcacgaatcggttccaattctatcgacttcacttgaactcccccttaagatacctttccccactgatcagccgttgtgaattcaatagttctccttgaagcgcaacacctcacccaaacaagagtcgagcattaaaatcaacttcttatctcacctgtttacgcaactcttgatccagccattccagtgctgcacgcagcttgtcctgaggaactttctcataacgatcacccgtagacagttcaaaggcacagctgtttccacttgttttgttcagatatgaagtcattcctatgccatactgctgagccatttgcacaagaactggttcaacttcggccgcagcgagcgcaaagtgcacatggaacatatttgataccggtacctcgggtaaggtatgtatcccgtcacacgcattcagtaagaaggcgagttcttgagcctgctcgtaatacaactccattttgctaatccgttcattgaaataatactgagaactcagaatatacggatacaggccgatcagatctccgccgtgccgacgtttccatactttcgattcttgcatcacatccggatcacccgccaatatagcccccgcaatacctccaatgcctttataaaaggatacatacaccgtatcaaacaaactgcaaatctccgcaggcgttttctgataatagggagtgatctcaaacaggcgtgccccgtccagatgtagcttaatcccgcgttcacggcaataggccgagatcgcttccagttcttcatacgccggtaattgcccaccaatctcacgttgcggaagttccaacagcagacaggcaatgtcctgatcaagcgcttgtacatcttccaaacgaatcaaacgatccttgtccgcaagtaaaattgattcaatctgatgcaactctttcagtccgtcttcctcatggatttcaagatgacacagagggtggtaagctactcgttttacacctttgcggtcacaccagattcgtaatgctatctgctgtgccatcgttccacttgggaaaaacaccgccgattccttgccaagtacgtcagccatctgttgctgaaattcttcaataagggggccgttgccgtagtggtcactgaacacctcgccatcgatctggtccagtacgttctgaagtaccttcacttggcgactgccatgaccacctacaataaagtctgcctgattaaatgcatcacccaacgttaacgcagtttctttcaagatcactcactcctttatagtgcatgttcataaacggacttttgaacaacctcttataggtctggttctgtaataatctcaaccaaagcgctgagtgcactagatatatgttcaccacgggaatacacaaatcctacttccaaccgacaatagggatcaggcaaagacatcaccgcgatctcacctcttaattctgctttggtaaccgaagaacgtggcagcaatgatacgccgagcccggcagatacaccattcagaatcgtgtccagtgttccatattccatgatgttaagcgtgtggataccctgatcgttcaaaaaggattccgcctgagtgcgatgagtgcatccgatctcaaaaaacaacatcggcctggacaataacgtgtacatctcatgtactccaggttcagcgatcaacaccaattcctcgtcatacatcttcatataattcagctcaggatgatcaatcggcccatatattaaggctccatgcaattcatgttggatgaccttctggttcagttcatgggtcccacccgtgacaagcgaatgttttacttccgggtagcatgaagtatattcagccaagagcggcgtcagaaaagtagaagctgctgtctctatggcacccagacgaagcatgccagctggtgggttacccacttgcgtggcctgctctgcttcatataataattctaatattctatccgcatacccaagcaggttctcgcctgctggtgtaagcgacatcccccgattggaacgatgaaatagcggtacttgcagttgggtctccaactgtttaatccgtgctgttacattggactgcacataattaagtgagagcgcagctttactgatactaccttcgcgggcaaccgcctgaaatattttcaaatcacctgcatccataccctgatcacctgctcgtcgttatatcggcattctgcatcatccgattcatgcaaagtgcttatctattattttcaatgatactgacaatcatttttgttcattttacgtgaatctgctccgtctgtacaatgaggctcagtagtgaaatctagctacacagacaggaggaatattgaacatgaaagctattgtccattcggcccagagcggccttgcaggtcttcaatatacagagtcaatctctcgggcaccagaagccggggaagtgcagattcaattaaaatccgctggaatcaaccatcgggatctattcatcatggcaggacgcggccctcaggacatcccactcgttcccggttccgatggagcaggtattatcgtagcgattggcgaaagcgtaagagggttcacgataggagatgaagtcattatccatcctacgctcggttgggaacatgcatctgaagtgcccatcgtacccgatattgttggtggccctacggatggaacactcgcgcaatatataacgttgcctgctgaaaatgccctgcctaagccagcccacctatcctgggaggaagcaggtgggctgtccctttcagcgctgacggcctatcgcgccttatttactcgcggtgtattgaagaaaggtgaacatgtgctcattcctggtattggcggtggtgttgcaacctatgctctgctcatggcggttgcggctggtgccaaggtgaccgtcacatccagaagtgaagccaaaagaaatgaggcactgcgcttgggtgctacccatgcattggatagtcatgccgattggagtacgcagaacgatctggaacctgtggacatcatcttggatagcatcggacaagccatgttcccaaaatattttgatataatcagaccaggtggacgtatcgtgatgtatggtgcaagctcgggggatgatctgactgtacccattcgctctatcttcttcccgcagatcagtctgatcggcacctctatgggcagccgtgaggagtttatccagatgctgcaattcgtggagcaacatgacatacatcctgtaattgatggcgtatatccgttgcaatacgtagcaaaagcattcgaacgtatggaaaaaggcgagcagtttggtaatctggctatccttatggagtgatatctattttgagatgggccttcatgaattgttgaaaattgatttacgataatggggtgaatccatctgacccgtctcgctaaacgtatactaattgttcttattactattatcattgtggcccaaattcctatgttaaaagaaaccttggcccgaggagttactacgttatatgtgaagataaagtatcccgaacattcctttcaattccaagacttcatctacgagtctcatttcggaaactatatcatttcttatactgatcaagacgaacaacgcattagtctgatgcttgagcccaatttttttccggcgctcattacgtatgatccattgaatcaacccatggaatgactagtttgttcacactatgaatcattcaggaggtatcgatatggacaatagattacatttggtagaattggttcgcaaactgatggactctgaaggaacggaagccgagttggatgacatgttaacggagctacagcagcaggttccacatgcggagatcagtaatctcattttctgggatgatcgagacctgacgcctgaacagattgtggaagaagccttggcttcccgtccgatcctgcttccgctccactgcaattgaaacaaggaagtaataatcaataaaccaagtttaccctccccaatttccataatttcgttataatggtaagcaagacaccatgctattggaggagaattatggaaacggaagctttacgcaacgtggaacaactagctctgaagaaacacaagatttacaaacaaagtttaatcaggtacctcgcacgctccatgctggccagtatgtttatcggattcggcgtcatcgtggcgtttaagacaggtaacttcttttatatggagcagtccccgtttacctatccgatggcggcaattacgtttggcgcggccatcattctgatcgcctatggcgggggtgacctgttcacgggcaatacgttttattacacgtatgcggcgctgcgcaagaaactgcgctggttcgaagtgatcaagctgtggattgcgagttatagcggtaacctgatgggcgcagctgtgtttgccctgttaatctacctgaccggattgttcgactcgtctcaggtgaatggttttctgttaagcgtggtagaacacaaaatggaagttccaaccatgcaactctttttccgcggaattctgtgtaactggcttgtatgtatggcgttttttgtcccgatgttcatgaaggagaatggagccaaaatgttcgccatgatgctctttgtgttctgcttcttcatctcgggatacgagcacagcatcgccaatatgtgtacgttcgcgattgcacttgtgctgaaccatccggggacgatctcaattgaaggtgtgatccacaacctggttcccgtgactttgggtaatctcgtgggcggtgtgttgctgatgggcttcatgtattatgcggtgaacaaaccgtttctggatgaagagacacattaatctctggcaaaaaaagacccccttccggcccggtcctccgaccgtggctaatcggtaagaagaatccaaaacaccccggcaaccttcccatctcagggagaaggttgccggggtgtttctctataggcaggctcacggataagccgcctgccctccacacgcatagccatgtgatacacaatcacatggctccatgcggtgggttggcaagcaggcagcaatcaggttgccctgtgttgcccgcttgccaaccccatccgtggcttagaagtactcccgccacggagtatattcaatatcgttgtcgccgcgcgtgaccacgatcatattctcaattttgcccgtctccttattggtacggtaaatcatcgtacgtgtctcgccttcttccggcacagagaacaggaacttgtccgcaacgaaggaagaaccaagtccagtggcatgttctgtaaaggcagagcccgtcttgcttgtgagcagcagaccaatcccgtaggctgtagccgtttgtgctgctttgccaaagagatgctcgccttgactggtcgtgtgcgtttgctccgaatacctatacttttccgtatccttgctatagtccaccacattgccctgtttatccagactgatggtggttgtttcgcccttgtcgcttttcacctgatacgtacctacgatggaatcctcggttatttttaccgtcttgcccgtattggggtcagtctgatagattacatcttcatactgaagccgaatgatgttcatgctggcctgaatctgctgcgccagttcttcgtcacccatctctttggctttcttcagcatttcctcatagttctggtatttctcggcatccttctcatcccattcatccatgttctttggtggacctggcgttttgtccagatcatcgcctttatttttgcccatggttgatagcgcccgcgctgcggtcagcgccgtcatgattgcctggctcaccgcctcttcatctgtcgtgcggaaacgctcggcaatcttcttaagctccgactgaatggacagaaccagttccagaacagatttcatcgtgccttgagccgttgaataatcgttataaaaacgctcacgctccatgccatcccagttgctgcgcatgacactcatcttaccgtccaatgtggacatgaagcccgataattgctgatgtgcctgagcgaactgcccactgaccgtctccagttgttccggtgtcaccttgatctgtgtcatcctgcacactcctcttcgtggtcatttatatcccgtggttaaccaatgtgttgcccgaacagaactctcccagatctcgaccaacttgtcatgatcctgttcccgatattcaacgactaacatgtccaacttatgctccttttctattaaaagtaaaaggttatgtaaaagcccgatcctgggatcggacttgtttaatacatcaaatttgaaataactctacgtttattttaccatgtccatcattcaatctgtacccataatttccaatcttgagtcaacgttctacccccgtttttggcttccaacggaaggttgctgccgattgggaaggcagtatatatcgaaacgaatctccgctcatgactacatcaaaggaaacttctgcctcacccgtgttagctgcaaccagcaccatcgttccatccggattgcggaaggttacgttctcgatcttgccctgttcttgcgtggaagcaactctcacagctcccggacgtacataacggctgatgtggcctaacacataatactcgacgtttctagtgatttcatcactgtccgggtcaatcgtcacaaccccacgacagttctcacagccaccattcgtaggtccaccttgcggatcgagtgcgatgttccagagcagcacattttttgcccagttgcgaggtgcaccaatgatgagattggacatctgccagctcagattctcgccaaaatcaggactccactccccaccactacattcggtaaaatagatatttttgtctgggaagcgctcatgcacttccgacatggcagatggatcacctgcataacagtggaaagcagatccatcgatataagcagcagcctgctcatcaccaagcaccttgttggtatattcaactgcctgatcccagttatgatcatacgcaatgattcgcgtgtccagtcccgcatcctgtagagccgggccgagataatcctgaatgaacatcgcttgttcttcagcttccatactcatactcggatatttgtccgaggtgaactccggttcattttgcaacgtgatcccgtagatgggaatgccctttgtctgataagctttgatatatttcacaaaatatctcgcgtacgcttcatacacctgaggatcgttgtaatccagataccaaccgttcgtggtcttctccccatacttcatccaggccggagccgtccacggtgtgcccagtacgttaagatccggtttcaaatcagctacacgctccagcatgttcacaacttcctgatccttttcgatcgaaaaggattccatgtcatagtccttgccagactcgatatcatcataggtataactcgaagccacacctgtttcatctaccgaataatcggaggcaccaatcgtatgacgcaccatatccatgttcagcccttctgttgtaaacagttccttcagcagttgctcttgttgttcctctgggagctcgttaatcagatgtgccgatgaacccgtcatcgctgcgccaaaaccatccatggtctgatacgtcttgtccgggtcaatctgtatggtgaacgccgacgaagaaatgtctggctcctgcgttgaagaaactgaagaacttgtgtcggcatcatggtgatcggtaattggaatgggcttctgtcgtgcaagcagattttgctgatctcccgtggttaaccagacttcggccgttctctgtttgtccacaaccggtggcggagcgggttgttcacttcggttgaagataagcgagattcctataccgacacaacaaacggcgattaacaggatcatccatcgtttgggatattctcgccaacctatgtttatcatgcttcactctccttccattgtggaaaaagccgcggccactaggccacgactcattttcctaatctatatgaagtagaacaaactgcatttaacgaaataacttcactgggagaacaaccttccaatctcccttattgaacttttatttaccggacttgcttccgatattcacactgcctgtcagacggatatcatccgatgcactgccaacatacacttggactttacccttaggcattacccattcatgggatgtttcatcccagtaggacaatgcgctgcgatccagttgaatgttgacccgttgttgcttgcctgctttcagatcaaccttcgcccagccagcaagttgtttctccggggtctcgactttggttggcagattgccaacatagacctgtaccacttctgcaccgtcaactttaccggtattacgcaggttgagggatacttctacggtttccttatcgcctttactagtgttcttcacatgtagattacgataattaaaatcggtatacgacagtccgtgtccaaaagcaaacgccggtgtcatgccttctttgtcatatcctttataccctacaaaaataccctcggaatagttgcccaccccgttcacacccgggaattgttccgcagtggataccggggtctgggaatcatctgatgggaacgtcaccggcaacttaccggatggattcacatcaccaaacagcacacgtgccactgcattaccttgttcctgacctgcataccaagcctgaacgatggatggcacttctttttgccaggaatccatttcaacagcgcgaccactcatttgcaccacgatcgtttttggattggctgctgctaccttgcggatcagctgctcctggttattcggcagctccaggtcggaacggtcgacgtaaccttcactgtcatacgtacgagttaccacgacggcaacatcggattttttcgccagatcaactgctttttgcattttgatatccacagcgtcttctggagcttcccagccaaaacgaacctgtgcacccatatcatgattggtctgtaccgggaaatccgtacgatactcaattcgaatattgtgggactcaccttctttgaatgtgatttctttcttcgttgtactcaatgtttcaccttgattgtctacgagtaacttatcatccacatacagtttcgcagaacctagactggtcagggacagtttatattcacccgtttgcggtgctgtgatcgcccctgtccaacgagcagacattttggcattgaatttcgtaggtgtcactggaagcttggaagactgcgcgttaaaaccttcatagttgtagaatccaagattcatgttgacctgattatctgtacggaccaaagaaggattaccctccatatctttattcgtccagtattcagcacgcagaccgtattccgcacgatctgtaccatactctctttcactttcctgagcatccgctggtgataaaagagtagaaggtacggcggatggtccattaaatgcatctcctgcggagataggatcggttccggcagcatattttacatccacaccgttaccggcacggttacgaatgccttgaagtggacttacggtatacgttggattaaccagactgctacctccaccagcagcagatgcgttatctgcatccggaccgatgacagcgatggatttcacgtttttcttggacagcggcagcacattatcgttgttttgcaaaagaaccatgctctcttctgcaatttcacgtgcctgtttgccgtctttcttggcattgatttgtgtattcgttacagggttatcgaacagccctttatcgaacatttgaagcaaaatgcgtctaaccttctcatcaatggtttgctcgctgacttcgccattgttcacggcttccagcaatttgtctccccatttgccgtaaggctctcccggtgtctccagatccagacccgcattggcggatttggctgtgctgaagtttgcaccgtagtcactcatgacaaacccttcgaagccaaactgatcccgaaggacattggtcagcatctccttgttctcacaagcatatgtaccgttcacctggttaaatgaacacattgctgaaccaagctccgctttttcgaccatcgcctgaaacggacgtgcatagacttcctgaatggcacgttcgctggctgttgcattggtcgtgaaacgttccgtctcctggttgttcaggatatagtgtttcgctgtagcgataactggattactttgaatcccgttcacatacgctgcacccatgccggaagccagtagcggatcttccccgagagattcgaagttccgggaaccccatggtgtacgtgcaatatccagcccagggccgagcactacattatgtgttgtatcatgtgcttcctgaccgatcagatcgccatatttcttggccagattggtatcccaggaagcggcaagcgcgatgggtgcaggcaatgccgtggactttttgtcctgcacatccgggttagccacacgtactcctgcgggtccatctgccatctgtaatgccggaatgccgaggcgctccaatccatcattatagaaaccataatagttatttactttaccggttacgaatccaactttctcctccagcgtcatctccttgagtagcagctcggtacgttcctccgctgatagagatttgttcatccaaggccgattggccccagattccgattccgcggcgaaggcgtgcagcggcatagccgcaaccgccacgatgattaataacataaaccatcgtttgaggaaaatcagattgagtcttctgttcatgttgtaagttctccttctctcttgatcatttttcttgtgcacatattgaatacatgtatacaagggaatgcgaactggcttgatcccagtctttcaagcattcaggtcgtcctgcacatggcttctgaaactgcagcctgcaagcaagtcagcagatttcgcttcctaacgatagccgacatgatcatgaattacatcccttaaatttggtaaatgaccgattagaacaagcctagttctttggaatcaccatgttaacaattcagataacaaaacaagaaaacgaattatttacatttccgtaactactttcgaacaaattctttacttttaaaaacagtcggttcgacccactcccgatcaaccaattaatgcaattaattatcagattaaggaatatatcgacacactctgggtcctaagtctatttgtaaacggaaccaatccggtccattgaaatatccaaaaatataaaagcagctgaagtcccttttaacaggttcttcagctgcctttatgttggaattgctccagagtaacaaataaaaaaaccgccccacggggcggctcacttctgttcaatcacttctagttctgtaactgtgcaagaatctgcgggtccttgatctttttatcttcggcgagcaacatcaccttggacagaatctcagctgttctcggatcttcatcgaggaatggcaggaagattcgaccccgatgctgactgtgcaccggtacgatatgaagtgcacctgtggcttgtttgaacacattaccactccccagatgaacagcatactcacctaattcaccatcaattcgtgcgtaattcccgtccaaacgtacattgtcgatcttcagcagacgcaacgattcgttcacaatgacgtggcgcatctcgattgttgtcaggctagcttccggatctacgcctcccacatgtgcaacgctgaccaccagatcgatatcacgcataacttcggagaagaacgtcagcggcacatcttgcagcgctacagatttgtagctcttacgatcgtagaactgcaccgtctccaaggtaggtgcctcggtatctgctggtgagaaccaatctgccatagcatagagattcgcaatcagattatgctcataacttaccttctgcagaccttcttcataactgacagtccattggcgtcctttcagcagagctactgcttttttcggttgaatttgatacccggcatatcggcgagacaccgtaccattagccaattcgtcctcgttaggaagatacagctcacggaatacctgcttgaacggctgacgctcctgacgggtgaacagatcccgctggaattcactccagcttccgctctgatacagatgaagcggatgagcaatcaacagttgatcctgttccgatagtgcctggatcgtaccctccggccctggagcaaccaaatcactggacgatatatcgaatcttccagtcttgtcacctgactggaagacaagtgttcttaccagcggttgtataaccggattttgcatcagactggcaatttcctcacgtgtaaatgacgttccagcagtcatcgaacgttccagctcctgccgtgcccggcgatactgatccaccagatccgatttcagctctttcagttcagcgatatatccatcttttttgaaccgggcaggtacagatttgagtgtcttgcttttgctaacgataaccatctcgggttggccttcctcatcaatgaccaattgtgccgtcgtgtcagcatccaatgcatgaggttcaaagaaggatttcatctcatccaacttacgtgcttccatgtcccacatcagccgcgtaacatcggcataacctgcattacgagcaagattgcccagtgcaatctgtgatgccacaccttcactggcacggcgttgtgcaccgaattgtttgctctgcatcaggaacttctgaatgaagtcgtatcgctcacgcagatcctgttcgcgatttacagcgaatggaatcaaactgtaggttaacaaatgatccttgtttcgcttgtccgacacggactcacgcatatcgtcaagtcgaagcttgcctagtgcagcatctgcgaacaattgggatctgcggtggttagatcccccggaaatgtacttggcacaatcgtataacagattgaaccgttcctccccgacagcagcataggcttcttcaaaccaagcgatatcaaacgcaccttcattaaagtcctgtggtgagattggagaatagtgggccacgatggtttctttctccgcagtaaagcgttcattaatatgagcatggaagtaccaagctgcactgcgtagaccttcccatcccagatgtttcgctacaatctccatccactgcggggcgtacatggctgcttccagcaattttttctcattcaccggatacttctggagcaactccccaagacgcttctcatcttctccatcccgtggatgacaattctgaattaaatagctaaacgtctctttacgtgttgtgttgtctccatagctatagatatatccacggacaaatgtatcctgatccatcgccgagactagatgtacccagtgttccatgccttcaattcgatccagtttcatggcaagtgtgcttacttctgtagagagttctccccgggtcagctcaatctccagaatgcgatcgaccaccgcatctcgcaattgaacaagcttcggatcactcgcgatcatttctgtacgagtggatgttaagtcccgaataaacaacagacgattcccaccgaccagcacctgtcgatatatctcttgatcatcaatcaggttcaactggtacgcacgcaggaaatcttcaagtgacagtaaagacagcggttgactactctctacaagactggtgaactggtaagctgtctggaagaaacgtttgaagctgttatcgtcatggattttgccacgaactacataattccaaggtccagtcagaatatgaagcatgcctgactctttttcgagtcgatcagcaggcatacttgcgatgatggaggcccaggttttctcagctatttcaaacgtgtcgatcggatcgctatcttgaaatgccgccgatatcagtgccactacctgatccttatacgttaacgaatccagcatctgctgcagcttttcgatgtcatccagaggatagatccgttcggcaaacgacttgcgccagccttccaataacggaatcttctgcaattcgtcatagtcatactgctcacggaaataactgtaatggtcgctcaaattgccattgaactccccgagctgtatagccatgtatagttgcatcagttccacactgttgaactcggcatgttgaatatagttctcccatacgtcatgaagcgggaactgttccatctgcttcatttcattccgctctccatacggaaccttggagcgaagactcgctccgactaacaatgtgtctttatagccagcgtagtattccacttgatactcataatccctgtgttcatgcactaattcactaagtccctccagaaatggtctggtcttatccagagagagtgtaaagatatccttcggattatggcccttgagatcacgcttctcatccagcaatggctcacgtcgcttcggatcaaataaaccaaatccattagaaactgtgaaacgactcccctgatcagtcagcttatccagtagtttctgttccttggcagtgggtgtctcaatcagctgcgccaatggctgcaattgctcctgctgatctatccgctctggatctgccgcaatctcggtcaataattctagcgcacccaagcgctgcagttcactcttggcctgcaaaagtcgcttcagcgagacctccaattggtccacgggttgcagtaacaatacatgaatgaccttctgacgaagtgagcctgttttgagcttcatcaacgcctccatctgtttcatctcatcaaccgtcaacgtgagcagcttcgctttggcgagtgcactctcccgattactgatgcttttatcagacaaactctcaaacacaaactgtctttgcacctcattatcgggatgctgaacaaactgggacaacagttctccgcgcagttccgggcttaaacggtccttgattgcgatgacctccccgatccattccgggtccatatcataagcggccaaatataacattttcttgactacatcatccgtatcaatccggtagtgaacatactcaagtacacccgatggtccacctgacccgccttttggaatggcagccagcatctgtttgaaccgatcaaaatcctgacgccgcaagcccttatctccaagagcaggcaatggccacacgtagacgctacgctgattctctccattctcgaaactccagttgtacatatacatcgcatcatagttggtcacaatccagtgcatcaactcggtatcctgcgcctccagataacgacgtgcaatgtccaaacgaagctccctgttctggctgttagccagtacatattgagcaacaatcttctgatataactgaccttgatccataatctcgattatcttgctcttcaattcattctcttcaatgaccgctgtcgcccaaagactgataaagagtttgttggcgttagcttcctgctgccaggcctcgcgtacttctggttgcacaagcgcctgataggcctgttcaatcaactgtgccgcaacacgctggttggctgcttctataccgatccccgtccatacggcaagcgctcttaccacggaactgaaacgaatcaggttgttgtcgataatgatttttaatatgtaaatataggcttccagtgtcccttcatccatccgctccacaatgctttggcgaagcccttcctgcaaccttgctgcaacgagtagctcacccaccatctgataggcatccgcctgatcgctcatgaatatacctttgatcatttcatgggttaacagcgccgtctgattgtcaccatagataatatcatgtagcgcctgcttcatatctccgccctgatgatccagttcataagcgatacaatccgccagaacccaacggatctcatgcaaataatccagcttgtactcacgaagtgacacatattcttccagcgagaaatttttcatttccatacggaacaatcccatcagtttacggatgacttgttctacatgctgctccggatcggatgtgcggaaagggcggcgttcatagttgttactgtatgggaaacgagtcacacgctctgcgatataacggaatcgtgcaaccaatgactcgctcgccagatgctggagcacatccagtagtggctcgaataatggtttctgtgtttctgcagccaaccttccaagcaacttatcagtattcaaaaacatcttttcgtctccacgtaaatacgtagacccggcgatctccacaacatagcctgccagctcaagctgtacccctgttaacgacttggctctttcctgcaatccatccatatacacctgtacttgctcttcctgattcatcctgttctcctccttcatcgttctctaccacagacgtccggctagcattgtaaaacgaataaacaccacgttatctccgtcttttacaacaagtgactcatccagttcctgcaattcttcatcgttgagaaacactttgtacaacccatcctcatatgcggttatagctgtctccatcgcaacttccagatcaggaacaccctcattgtatactgcgccaaacccgactttccccaccgctccttgcgcgtcaatatcatccggcatcaggtaggcgaacaattctgcctgttgtttcttttcctgaagcgcttttacttgtacagccaccatgttctcaatgagctgccttaacgtatgagttgtttccggaagttcggcagcttgcttggcaagtaccggcttgcgctttcccagactttttaccgttatccatacgttcactgcattccctcccttatcctgctctatttgaagaagcttccataagccccgatatctataccacgatgcggaataacctaaactcgaaatgattatctgtctctaaataaaatataaaatacgtacatatgtacccctaatgaacatcataactaaaattcaatccatattcatgagccaatcctcatgtttacgtggaaccacggaactagggcctacttgcgtacatatacgcaaaaaaagccgcacagtgtcatataaatatggactgcgcagccgctaagctaccattagaacagtttatgtcgccggtaacctgtaattttatgagtcatctcgccagacgcaacggtcgaatggttacggctgctgtcttgaacccaggcatccggcagaacggatctagctctggtctggtggcccgattcacattctgaatgccgccccaatgcatcggcacgaacaaggtatcctcccgaatggaatccttgatgcgcgaacgaaccgtgaagcttccgtacgtcgattgaatctctacccactctccatcgtgaatacgataacgggcagcggtagccgggtgaagttcaacaaagttctccaattcacgagctgccagtgccggacttcgatgtgtctgcacccctgtaagataatgaggtagcacacgcccattggtgagaattaaggggaactcggaagatatatcattccagcccgggctggattcaaatgtgaatgccgctttgccgtccgggtgagcgaatcgttcaccgaacagcagcccttctccctgatcctccagggcagaacacggccagtatacccctttctcgttacgcaaacgctcataggtaatgccatagtaatcagccactccgccacgactcgccacccgaagctcattaaagatatcctcagcagtgtcatattcaaaataagaagctctacccaattgcgcggcaatccggcataatatatcccaatcatcaagcgtttctcccggcgcaggccgcccctgttcacggagcagaacacgcccctccagattggtcaatgtaccttcattctccatataagatgtaaccggcagaaccagatcagccattcgcgctgtctcggacagaaacatgtctgccacgatcagaaagtccagcttgcgcagaccttcttccaccaaacgcacattggggttggatacgaccgggttggagcccattacaagcaacgcccgaatctcctgatcatggaccttctccatcatctcgtaggcggatacccctttgcctggcaaacttgcaggttccacgccccagacggatgccacataggcacgatcggcttcattttcaatggatcgatagcccggtagctggtcagccttctgcccatgctcccgtccaccctgcccatttccttgacctgtgatggcaccatatccgcagccttctctaccaattttgccagttgccagcaccaggttcaaaaagtgtctcactgccatatgtccatccgtctgctgctccacaccacgtgctgtcatgatcatgcctgtctctgcctcaccgtatgccatcgccgcctgacgaatcagccccagatcaaccccgcacgcttgtgccgcctgttcgagttgcagatcagccaacccttgaatcaattgatcgtaaccatgcgttcgtttgtctataaaatgaggcttcaccaatccggcatccataatcaccttcaacatgctgtccgccagcagagcatccatgccaggcttcacctgtaaatgaaggtcggcaatggcagcggttgccgtcttgcgtggatcaataacgataatgaacgccccgttctccttggcctgattgaagtagggcaacagggtaggttggcattctgcaatattggtacctgcaagtacaatgcagcccgccttggaaatatcggacagacggaacgtcaatccacgatccatcccgaacactttactgccagctgaagccgcagctgacatgcagaaccgtccattatagtcgatatactttgtccccaatgcaacccgggcaaattttccgagcaggtaggctgtctcattggtcaaagatccgcctccgtagactccgaccgtatctgctccgtataaatccctcaagtcctgaaaccgctctgcgatggtctgaatggcctccttccaggaacagggttcaagctcgccattacgacgaatgagcggatgcattaatcgttgaccactgagcgcatgttgatgagcattcatgcccttcacacacaacctgccctgagaggcttcattcgggataccctgaaccgtatactcaccacgacgctggcctggaacaggcgcagccagttcttcaacagtcatcttgcactgcacactgcaatacggacactgggtttcctttacatacagcttggaagctgttggttctgaattcacggataatcccatctttccatccccgcctttcatctatatatcagcttgaagtgtagctgcaagttccttctgtaactggtcatccagcagcgtttcccgaatcgacatgaatcccaatcgttccgtccatgcccataacggctcatcataccaagcggtttggcgataccattgaagacaggctgatgcgagtgtggccgcttgcacctctgtttcagccaccccaatcaagccaccttgtttgaccggatgctctgcattaccgcctgcgtagatctcccacccagctggtgaagcaaacaagccgatatcctgcaccagtgcgctcaccaatgatcccggccctggtgcgactcctacattcacgggcgacggcattgctgcgccgatccaactcgtacgaagctgtgcagccagccccctggcatctcttgcataggatgaaagcgggatctgatcctcccagcgtacctgaacctctgagtgagcttcgatctctcgaacaaccatcgttccaccggatacctgtaagtaataatgaattacgggacgacataccgtgcaaccaagctccgaaccccaacccagcttctgaaagatcaaagatatgtctggtagctctgtctccagaacatcaatgttagccagtatttccttcagttctgcatgcccaagcgccgtacaactgcacacaggcattggagcaggtttatctggtgtggctaccacgccagtacccccgttatttttcaggttatgcgtatgtttcaacagagcagccaccatcgggcgacagccaccgcatgaacctgacgccttggtctgctccttcacctgatctaccgtctcgagaccctgttcctgaatagctttcataatggtagccttggtcacattgttgcaggcacatacggtttcctgagcgggtaatgccgcagcaaccatctcagccgggtccggagccccttcacgcggagccaattccgccacatctgcgcctcgttgcacaagtccaagcaatgccgttccttcggttgtatctccaaataaaatggctccgcgcactttgccagcctgcatcagtacttttttatatgtgccttgaatgccatccagatgttgaattgcggtctgcatgccttccccactgatctcacccgctgagaaaacatcaacccccgataccttcagctgtgagtatggaattgatcctttgtattcaggcgtttcctgtccacagagtgtatgtgcgagcaccttcccctgttcgtataagggggccaccagaccataactaattccccgatgttcagcacattccccaactgcgtaaatacccggtacactggtgcgcatatagtcatctaccataattgcccgattggtggcgattccacttcgtctggccaggtccacatttggccgaattcctacagcgacaatgacaacctgtgcttcaagcttggaaccatctgtgaactgaaggccctgaacctgtgatcgcccggtaattttctgcgtatttttggccaaaagaaaggacataccctgcccttcaagttcctgttgaagcatcgtggcagccttctgatccaactgccggttcataatgtaaggtgcgttatgtaccaccacagcttccatgcccagatgcagtaacccgcgcgcagcctccagcccaagcaatccaccaccaatgacggcggccttgcgataggttttagaataatcagacatgcgcgtacaatcatcaattgttcggaaggacatgaccctctctttatcaattcccggaatcggtgggataaaaggtgaagaccctatcgccagaataaggacatcataagtttcttttagtccggattctgtctctatatattttccacgggtatcaatgcggtgtaccgtttcacctgtacagagccgtatatgatgctcggcataccaagtccaatcattgataatgatatcctgtaacgaatgctcaccctgcaatacttttgataacatgatccgattgtagttgggacggggttcattgccgtagattacaatctcatacgtatcaggctccagtgcgataatctcttcgacacacttcactccagccatgccattcccgataatcaccagtttgcttctactcatgggctgccccctatctctctcacctgaaaataaacagaaaaatcccttctccatgattcggaaaagggcaccgttgcctccggaatccacacgcctttgtgtggattcatattagattcagattaagggaatccgaatctaatgtcaactaaattgacattaaaaatgcgaatgaagataaaaaaatgaattatttaaaattacatgtaatttttgttgacatatatattttttcttgattataatttgaatcaaaatcacagtgctgtgatcaactcagatgcgggaacacaatgacgtgtaccgcctgtcggcaacggggccgcaaatcgttcagatctggacgaattgcggcctttttctgccttaacaagcacatagacaaatcacgaagatctcaattggatgaggagcgatgatggatgatggagagcaaaagtttttggaaaagcgggcataagcccaccctcttcggggcgtttatgtattttgacatcagttttatgatatgggggatgcttggtccactcgcagttgtcatagcgttggattatccgatgactccgctggaaaaggccaatctggtcgcattgcctattctcggcggctccatcctgcgccttgtgcttggcttcatgtctgattatattggtccgaaactgaccgcacagatcgggatgctcgtcaccttagttcctttattactcggctggttatgggttgactccttaagccaactgtacgtggtggcactcttgcttggtgtcgcaggcgcctcctttgctgctgcgctacctctggcaggccaatggtatggcaaggagcatcagggtctggccatgggtattgccggggcgggtaacagcggaaccgtactcgcgacgttgtttgctaatcgcttggctacgcattttggcagctgggaagttgtgttcggacttgctattataccgatcgttattgtattcatcctcttttcaatctttgccaagaatagccctaaccggcctgaacccaagaaattgtcccaatatggaagtctgcttaaacaaaaagatgcttgggtattctgtgccttctattgtgtgacctttggtggcttcgttggattatgtaactatctcaccatcttcttcaacacccagtatgggctctctccagttcgtgccgctgacattaccaccttctgtgtaatcgcaggcagtttcttccggcctgtagggggttatctggcggacaaaattggtggaacccgcatgctaacattcctgtacacaggggcttgtgtcatgttaatcggagtatccttcatgccaccgcttcctgtggtagtagtcatgttgttcctcggtatgatgtgtctgggagccggaaatggctccgtgttccaactggttccccaacgtttcggcaatgagattggcctgatgacaggtattgtgggtgccgctggcggattgggcgggtatgcactgccgctgattctcggtcaactgtatagcagctatcaatcctatacaccaggttttgtcattcttagcctgattgcagcagcttccctgttcctggttctcttcatgcaatcccgctggcgtgtgagctggttgagccgaggtaacaaaggcatggcggaatcgacatccctttcttcctgagcaaccactcggccgttaaccaatggtacggtgtatgtggatgatcccgaagtcgaagtaagcaaagaacagcgcagcccgatggggctacgctgttttttctgcttaaagctgcttttttgcttaagatgaatacttttgaagaacaataaccgcattatgaccgccaaaaccaaaggaattagacatcccaatccgcaactctgcttttcttgcctcatttggtacataatccagatcacattcagggtccctctgctcctgattgatggttggaggaatgatgccatgccgcagactttgaataagtgagatcgcctctgctccacctgctgcaccaagcatatgtcccgtcatggacttattcgctgtgaccggaatatcataggcacctgtcccgaaaagttgcttaatcgctcttgtctcagacagatcacctgcctccgtactggtggcatgagcgttaattacatcaatgtcctcaggtccaatctgagcttctttcagtgatgctttcatcgccagatatgcaccccgtccttccgggtgggtagctaccatatgatacgcatctgaactggcaccatatccaatcacttcggcaagaatattcgcccctcttgctagagcatgagacagtgattccacaaccagaattccagcaccctccgccatgacaaaaccgtctctccctgcatcaaatggacggctggctgcttggaacgcttcatttcgtgtagacaacgctgtcgcattaccgaagcttgccagtgacacttccgttacagccgcttctgttcctccagcaataatgacatcggctccgccatgacgaattaaccggaaagcctctccaatggctgtattgccaatggaacaagctgttactggcgacaatgtcggtccccagcaaccaaacctcatactgaccatagctgccgccatattggatatcatcatcggtaccagtgttgggctgacgcgcgcaggtccccgttctgacaggaccttgccttgttccatcaatgtctggatgccgcctatgcctgaaccaatatatacacctacccgttcacggtccagttcatccatcacaagacccgattgtgatacagcctgatccgcagcagcaacagcaaattgaacgaatcgatccatacgccttgcttccttgcgtccaaaacgctcttcaccatcaaaatcacggaccactcctgccattctggttttgtacgaagctgtatcaaaatgttctataggtgatatccctgatctaccctcaatcaatccattccagaatgtatctacatcatttcccaaaggagagataactcccatacctgtaatcacgactcgttccatgtccatcctccttcagcgctgttatctaccttaccttacgctctgccactaatagtgcacttttgaatatcctattacaagttgtcaattataatagtataatgactaccatgataacgaggatcgaaggtgatggattgaactacgatgtcaggttacaggcattgtctacttttctgaaaacacagcgttccaaactttctcccgaatcggtcggtttacccactggaagtcggagaagaacacctgggctgagaagagaagaggtttcccaactggcaggagtgagtacaacatggtatacctggcttgaacaaggtcgggatattcaggtatcccattccgtgttggataacattgcttcagcactgaggcttactgcggatgaacgaaagtatctgttttcgctcgccatggagcatcatacagagctgcccacactggaagaagaaccggttcaacttcccccttccttgcagaaaattttgcaagaacttcatcactgccctaccgtgatctcggatcggcgttgttacattgtcggctggaatgatgcagcccggcatgtttttatggattttgaacagattgcccccgaacagcggaatatgatcagtctgttatttgatcgaaaggagtttcgcaggctcgcggtaaactgggaggattttgttagcggatttctggcgatttttcgtgcttactatggccagtatgttgatgatgaatggtataatttatttttggatgacatgatgaacagacatcccgattttcataccctttggaaacaaagcagcgtcagcagtgccccggacgtattaatcgagttcaggcattccaaagcaggcaaaatgttgtttgatctgacttcgttgcaggttcagggtagttccgatctgcgatgcagtgtctacacccctgcgccagagagcgctaccgagcgcaaactgatgcgcctgatcgagcgtgaaaccgattcacatcttggtaaacattaaatcggagtctctcaggtcttgcccaatcatgttagaatcctgacatccttttgttgcatattttaattatcagggtatacatgatcaagtatattaagctaacccatggatcctagaccttctacacgaagtggattcagaaaggaatatcatgaccaaagtgcttatcattgaggacgataacatgttaggagatacattatccctgtatttgcaaggtgaggggtatgacgttatccgtgtcgctaacataagagatggtcttctacaacttcaagcgaggcctgatatcctgcttcttgacctattgctccctgattcggaaggcaagaatccctgttctctcatacgtcagcatacagcaattcccatcatcgtcatctcttcgttaaccgaagtctcggagcgaattcgatcattaatagatggagctgatgattatgtatgcaagcctttcagcatgcaggaagtgaaagcacgtattgaggctgtattacgtcgttactccatattgaacagctccattgtcactgtacaggattgcggaatttctctcgatttggctcggcgagccgtcctgttgaataaccagcgagtggagatgacattctccgaatttgagatcatgaagctatttgtcctcaatcccggcaaagtctacagtcgttatgccttgattgaagccattcgtggtattgatgcttatattaatgatcgcaccatcgatgtgcacattaccaagcttcgtaaaaaaattgaagaaaacccgaaaaacccccaatatattcaaaccatctggggggtcggatataagttcacaccttaacacatcagcttcattcatgtcaccagggcagagaccctgtaatgatatcaatctctttttgtaccttctccaaaacggaactcagttcctcttcttcgaataacgaacgggacaaaagcgattccagttgaagaattagacgtaacagctccactgcatgcagattggcagccacgcctcggagagaatgaacgctgcggatcgcaccagcaatctgctgctggcgaagttgagtggtcagtttgttctgaaacgagtcatactccatcctgaatttcgtgagcgcatattgcagaatatgtggcttgccgtccatctgcctgatcgccttatctacatcaattccgctaatcttccgcatacctctcagatcaatccatgttgccaatatgtctgccatctgttgttcatggatgggtttggtcaggatggcattcatcccagcctccatacatctctcatgatctatttgtagagcatttgctgttagtgcgattatgggtgtacgatcatattccctcatcttgcgaatatgtcgcgttgcttccactccattcatgtcaggcatgtacagatctattagaatcaattcccatacttgttcgtctaactttctcagaacctctgtgccactagctgccagcgtcacatgaaaccccttatgttccagcattgcccgaatcgccagttgattgatctcatgatcctcagctatcaggatatgtccgttctgatcaagcgaatagggatcgtcgccttcagccaactgacttttgaccaacggaccttcaccctgaagtgcaagaatgacttcgaacaatcccagacgtgtaatcggtttgaccatcacgatatcagggtgcacggatctcttctcaatccacagcgcattttcgctaaatgcccgtgtgtaccccaacacctgaattttcgttcgatccaatcgcttcatgaagttgtcccataacgaaccgttgactgtgtcttctatatccatatccaacatgatcaacatcgcttcagcttcaggagtatacccatcactctccatcatatggttcaaggaagtatacagcgtcggattcatcccgaatgaatagagcagctgcttcaggttttcgcccatccgttcatcatcttcaatgataaccgcatcattcgcaccatataggagtgggtgtgtatgcagggagaaactctcttcttcttccgaatctgcaagttcaaatatcaagtcgaatgaaaacagactgtactctcccagcacactatccacccgcaaacttcctcccaaagaggtgaccagaaggtaacagatgaccagcccaagaccagagccaccatatgttcgatacgtcgagggttccgcttgagtaaacgggacaaagagccgttccaattgttcgggtgacattccgattcccgtgtcctccacctcaaaacggacatgaactcgctcagcctccaatgaaagaacctctgcctgcaacattacatatccatgctccgtaaatttaatcgcattactgagcagattcaataacacctgttcaagtcggaacggatcaccaatcaccgttaatggcagatcgggatcggttgtaaaaatcacttcgatatctttgtgcccgatggccacaccgatctgatctgccacacgtttgatcacatcctctggtgaaaaagagaccttctccaaaatcagcttacctgcctctattttcgaaaaatcaagaatatcgtttacgagggcaagcaaggttttggaggacgcattgattttactcaaataatccttttgttgtggagatagatttgtccgttgaagcaacaacgaaaagttgataataccgctcagtggggtacgaatctcatgactcatgaatgcaagaaactcactcttcgcctggcttgctttgtcggccttaacacgtctatagtgatccgaaatgtcatgaatgactgccttaattttctcactcgagtttaatactttaacaggggataggtgaacccgaacatgctgctcatgaccttctccaacaatgagactcaattccgtatcctgaggtacattgtgatgtaaggctttttggaaaacgaacaaccagttctccagctgctcaatgaacaacaattcttcaagctgacgcccaatcacttcctgcctgccgagaccgagaacatccagaaatttctgattcaccgacacaatacatctgttgttatccaaaccgacaagccagtctgccgacacccgctcaagtgttcgatatcgctcttcactttcttgaatccttcgtttaaccgctctgtgctccgtaatatcaagtccatatcccacgacatatttcaccacaccctcttctcgcagagggcgaacgttcaccagcgaatagtaacctccatgctcaatctcgtaaaagaaagactccccttcccatgcccggttaaactgctttcgcagaaattctaccttttcctgaggtaaaatatccaatgtgcccagtttgtaatcttgcttcagactactcatatccaagcccagtcgggagagcatctctccctcaagcacaagatactcgaattttccgttctgttttcggattttaaaagtaaaacccggctgcatacgaagcatctccagcatttcctgatccctctgaatgaccaatctcctatatcgatgattttggttcagataatacaggaataatataacggacagcaggcagatacattgaaaaaagagaatctgccccatcattagcagagaaggggaatttgtctttagtgcagaaaactcatacacagtaatcaacagcaacgctccggacaaccacttctgtataaatcccctgatatacttaaagatcagacatatggctacaacaaataacaactctgtcaacgcatactgccagttctccaacaagggattacgccccatattaatccgaaacatccacatgaatgcaaaagtaacgaaagcagagccactcccaccaaaataagcagcaagcagatacacaatggcccggaaattcaacaatgtaccatcctcaagcacaatagagaaataataaagcgccgtgcccaacatgctcagcgtaataccaataatgattcgagtcgtgatggatgttgaacgggtagcatttgtatggttcaaatagtgatgaattaggaaaacaaagatcaaaattagcgtgaaatttaatacaagatcgcgtagcaaatggtcaccgtccacattacgacttcaggatttcatgcattcaatgaatgttgtcagattcatggtcgcagttcctcagtacacaaatcatagtatgccgtgctcccttattcaattgacgatattgaccattttttagaaaataactgatcctttcagctaacatactcttatcgctagatgacgtgttttctcatgaaagttcatcattaaatatactgatataaaagagagagtcatccaaatgtaccgatgttatggtgacctgagcttcccatacttcctgatcaaccttcattagtttggctacgccggaccaggtctggttccctctccagtgggtatccattagcaatcgggcaggctgacctatggtgctctcccgtgagaatcctgttttggttacataaacggaattcacatccagaatcacaccctcctcatctgtaatcatgaccgcatccgttagcagtaagaaggctttgagttccagttgcatggttgtccactccctctaatgaaacatgatgtgatgctgtccctgtgatactctcttctacgatcccgtttaatacttaaactgtctaatcagacgctgcagctcttcagccagggtagacaagccccgagccgaggaagaaatctgctccatcgctgccagttgctcctctgaggaagcagccacttcttcggaagttgcggcgttgcctgacgcaatacctgccaactcattggatacagcagatacttcctgcacacctgctgtgatctcttgcgacgtggcagcaatctcttcaatctgaggtgtcgtttcccgcatgctatccagaatacgttcaaactttcgaatcgcttctgtagagatgtccatgccctctccaacctctgaagtcaccttctccatcatgcgaacggaagcagccatatcttcctgtaccgccgtagtcagcacggtgatttcattgacggactgcccggattgctctgccaacttgcgaacctctgctgctacaacggcgaatccattgccatgtgtacctgcacgagcagcttcaatggatgcgttcagcgcgagcaggtttgtctgtttggctatatttccgattaactccgtgatcgctgaaatttggtgtgatcgttcatataacgcctgaatcaattggtttgtctgttctaccgtctcttgaatcgattgcatctgactcaccgtctgtttgacggtgttgccgccttcttctgcttgtacggttgtatgtttcgccaaatcagcgacatgtatggaacgttcggcgattcttgtaataccaatcgtaatttcattcatggcctgatggttatgttcaataccttcggtctgtttctccgcaccactcgcaatttcctgaatggctcgcgctacctgctcactggctgcactggttgattccgcactctgagtcatttcatccgatgagatgactacctgactggcgctgttctccacattttgaatcaacacacgcagattgctctgcattttgccaaaagcctcactcagttcacctatttcatcattacttgtgcttgtaatggtctgggttagatccccttcgctcacctgaatcgcctgatccttcaattgacgaatcggtttaacaatcgatcgcatcacaaaccagatgatcaaaattccgatgactagaaaagaaataatgaccataatcgttcgattcagaataggcgcagcggcatcctctacttcagaagagaacatggtgccagcgaccttccatcccgtggatgcattcgtggcgtaatacatcactttatccgtttgatcaacggtatatttgaaattgcccgattcattcgcatacaccggtttccaaaaatcctctgttgcatctgttccgggttctaccgtgggatggtagatatacttttcgctggcatccaaaaggatcagatatccctgttctcccacgttaattccacttaccaaggtactgatattcgacagattcagatccagctggactacaccagatcggccattcaatgccttggcgatggtgatggtgatttcgtttgtctcggcggaaatataagggtctgtaacaatgacctgctctggagtactcatcgcttctgtgtaccatggtcttgttcgcggatcgtaatcttcaggcatttccgcattggaggacatcaggtagacaccggcttctgttcccactcctatggtgataatgtctttgttctgtgcagcgtaccccttcaattcgttcacaacccgaacctctgcatcttcttgacgtaattcctcggcgagtgtattcgcataatattcaatgtggtcgcgcttggcattaatcgaaagatcgatggtcgcactggcaaggttcacgttttccattgcactatgtagaatttgcttctcaacttcattcttcgcactgttataagacaaaactccaatactgaacgatggaatggccaagaaagcaataaaagacaccaccagtttcgtcttaaaattattatggatcttgttgaaccaattcgatttgctattttttcgggacaaatttctctacctcttccagattaatttagttttacttggtctagctctcttagagtacagagccctccttcctcaagatattaaaaattaggtcctgcctctcgcaaaagacaattttcgcactagaaatattacttaaatctcttaatttataatcctaaagaactactttcaaacaaattatacgaaaaaactattaaataaagtaacccagcgatatgaccaaattgttaaatttttaaatacttgttacagtaacttgccgaattccataaaaaaaagatccaagcgttatcgctcagatctcaaaagctgttcacataggactacgtattctctatttaaatgccgggatcgcgatatctgcatatttctcttcgaagaaggctttgacctctggacccgccatgcgtttagccagcttctggatcgcttcggagtccttgttatcctcacgggcaaccatggtgattgcaaaatgggaatcatccttctcggttaacaatgcatcctttttcggtgtaagaccgagcggactggcatatgccggagtcatggctaccagatcagcatcatccatcatgcgagccagcatcaacaagtccacttcctcaaacttgaagttctttgtattctcggtgatgtctgcctgtgtggcgttaaaacctgcgccctctttcagcttaatcaacccgttctgctccagcatcacaagagagcgaccaatgttggaaggatcgtttgcaattgcaatcgttgcaccttctggcaattcctcaatcgttttgtactttttggagtagccgccatagatggcattatagataggctgtacagccaccagattggcattgttcgcttcattatactgggtcatgtaaggcacgtgttggaagaagtttgcatccacttccttgttcgccagtgccgtatttggctgtacgttatctgacagcacaacaacttccagattgacgccatcttccttcagtagcggtttaacaatatccagtacatctgtcatcggtggaatcaacgtggctactttcagcgtaacttcttgtgcagcttgtgtatcttcttttgttccttcagccgcaggtgtttcttcttttttgccacaagcagctacaaccagcattactgcaagcaacataagcatcattttcactttcatttcatgtctacccctcatcgtataatctgtattggttattcgtaataatgcacggtccaaccgttcaggatctgcgatccagccagtgggacagtctgctacctgtgaattggatcatctgtactaggataatcataatgatgatcgtaaataccataatctccgtttcgaagcgctgataaccgtagcgaatggcaaagtcaccaacaccgccgccacctacaatacccatcaccgtcgagtaggagatgaagctaatcgtagctgtcgtgagtcccagtacaagaccagatcgtgcctccacgtacaagaatttcaccacaagttgcatcgtcgatgcccccatggaagcagccgcttcaaccactcccctcggtacatccagcaacgcttgttccaccagtctggcgtagtaggcaatcgcaataaccgagagtggcacggttgccgccagcgtaccgatggacgttcccacaacaatccgtgtgaatggaatcatgaatacaaccagcagtaagaacggaaacgaacgaacgatgttgacgacactgccgagtacaaaggacagcgtttgattctgataccgttgtccttttcggaataagtatagcagtgtacccagaggtaacccgatcagaacagctgccgcaatggagatacccaccatgacaaaagtctctccgatcgcctgccatatctcatgctgatatttcagcacagactcaggtaacttcatgacttgtcctcctgttctgcctgacggaacagagacgaacctgtcatcccgtattcgtcacccgcaagcaaggaggtcagcagatcaggctgcggagcagggatactgctcacttccgctttagacaacgtacgaacgagtcgcccatccttcatgacggatatcctgtgacatagtctgcgagccacttccatctcatgcgttactacaacaatggtcacgcccagcgtttcattgatatgtcgcagcacatccagaataccgttcgtggtctgtggatcaagcgaagaggtcggttcatcacagagcagcacatccggacgactagccagcgctcgtgcaatggccacacgctgcttctgtcctccgctaagctgagcaggatattgacccgccttgtcttccagtccaacaaaccgcagtacctcaagtccacgttcaactcgctgcgcacggggcatacccgcaagctccaatggcatgcagacattgccactcaccgttcggttactgacaagattgaagtgttgaaagatcatgccaatggatcttcgtgcctgacgcagactctgttcattcatctgggtcaggtgctgcccattcacaacaacctcaccatcatccggtttttccaatccgttgagcatccgcagaagcgtggatttgcctgcaccacttgatccgatgatgccatgtatttctccttgtcccacttcgagggacaccgagcttaatgcttcgaatccctgatctgcacgggaaccgcgctcgttataacgtttgcttacaccatataatgagatcatggagagtcctcccgtgaatgatcatgcatggttcttcaagaacacatgaagaaagcccgcacagccgataaccggagcgcgagcaagcctgttcatttataataaatcaacatcccttacgagacaagcttttaaggtgagattgcctcctgcaggcggctggcttcatatacacgaaaacgtccgttggacgaacccacatacacttcattaccgatccggttaatcattccattcttcgcatcccggtcccggtgctccgggtttcccatcacaacgtcatgtacacgacctaacagtgctccattctttttattcatcacgagaagattttcgtccatgggcaacagcaactgatcatcaatgaccagataacttccctgattcgtcggatgccttagtgttgcaatcgtatctttggcattccaacgcgtctcccccgttttataatccacagccgctggataaccattcttaatcacatacaactgatcctcttccactagtcctcgttcaatcttgcccttgagcgtccagcgtgttttgcctgtcttggcatcatacagggtggttgtaaaatcttcatattctccgtaatgattgccattcttgttctcacggatcaacagcatgccatcattcagctcctcaaatctctgtcctacccgagcagggaattgggcaagctttttccccgtgttcagatcaagcagaagccactgattatctagtgataaccatctttcagcattcgtggttgcaaagggatcaagacgttcaattccaccagtatatggatcattccaaaattgttctatggtggatcgtttgccctttaagctccatacggttcgccctgattgcggatcggctgcaaccagcttattcttttcccaatacaacacataggggtcatctgcactcttattcaatagttcataacccgtagccagttttcgcgtccacaatgtttttccgtttgcactgtccagaaccgttaaccaactgttgcttgagctctcaacaaccggggtatccacaaccacaacgttcttcgcagcggtgataccatttagtctaaaattttgcttaggggtgttcgtccacgtgacctttccgttcttcaagttcaaatgacgaatatgatccacgtattttttcttatcagggtcataatcggtgtagattgtaacgtatttgcgctctgcatccaccactgcctgctgtcttccaaaacccccgttgatctcccataattgctggccggaatgtcggtcaagggcatatatagaaccttcgtagtaacccccgctgaatccaccgtcatcccctttcatcagaagcacatcatccgtggctgcttgtaaaaaagtgtagttaatatccccctggttggtccataccggtttccaagggattgtcgttggcagtgttgtgccatagatttttgttgtgaacccatattcatccgcccgactgatgttccaatcggaaacaacagcatttcgattatcctgtgctaaattccagcgtgttctggccagtctgccattcttgtttaatgtgaccagaaattgcgcatcttcccgctcatatctccaggtctgtccaatactcattgaataacccgtgaaatttagattgcttgaactctctttccaatccggctcgcctaaccacccagccacttgtttggaggtggttgccttgttcagcttcatatctgtcagatggcgtataaccgaagttggtagcgatgcatcctgttggaaccaaccatccgccacattcatccgctgttctatagcctgtgccttgatccagaagagtcctggccgatacgtggaggattctttattccagactcgtggggcaatggataccccataccagcctttccactttgcaacaataacagccttatctgttagcgctttctcaaaagaccaggttgtagaactatctggtgccagatacagcttgctgcctgattggagtgtgaagctttggggagctgtttccgtcatacttctgctctccttcagtgcataccaacttggcagccaaaagtttccatgatcggttgacttaagctgcacccactcacctcgaaccgaggccaacgtatacttttcgttttttgttgtatagtattcaatccccagcttgtcagcagccacactgccgtcccttctgtttttgaacagagggatgtcattcataagcgtaacggtgtctccttgtttgtaagctaactttgcagttaagacttgggaacttgcccccaatgcttgtggcgttgtagccaaagcttgtccttcaagggcgaccattttggaatccagcagcatccagcccgtcaacagcacagctgataatccagtcatggtaatccatttgtaccccgttctctgccagtcaggacccgtcttcactctcgttcatccccattcattagaagttatttccaatagagacgcagtaaaaaggaaaaagttaccgtttacctcaatatatttctctctatctccccgtattaccttacatccaccatcgtagcatgataaggaaaggtaaccccgatgtaataagcagctgttaaggtgagcatataataaaatacaaaccacagatcagctcgcgaatagccaatctgaatgtaatacgttcggctcgcgccatctgtgaaccctttcgcttccatcgctaccgccattcgctgtgcacggcgaatgctctgtgccagcagcggaatagcgtaacgcttgagtgtaccatacacattccagcgagagccgcgttgctgtgttccacgaatacgaatagcgtaacggagcgtctggaattcatccagcaaaatcgggatcatgcgcatcgcggccagaaagctataagcatattttgcgggaagccgccactgctgcatcagtgaataaaacagccttaccggcttcgttgtcagtccgaacagcatgccagccgctgccatgctcaacgagcgaaaacccaagtgtagaccgcgatagaaactctcttcggttatgtggatcagtccccacttataccatgtggtctcgcccttaccaaacatcatcatacctgtagacgtggagataaacaccagaatgaatggtgatgcgtacagcatcaatctgtaccacggatgacctgtccagcacagtaacaacatcatcgccaacgcaacgttggccattacattcagattgtgaatgaggataacgatgacaaacatcatcgtcagagtgatcatctttaatccgggattgacgttatgaagccaggtttcacggtgaggaaacgacagttgcatcagataacctcccctcatctaccgtccagattcgggtgcaatatctttttacaatttcacgatcatgggtaaccataacaatggctgttccctctctccgcaattgctccagctgtgctaacatggcaaacgtattgcgggcatcctgtccaaaagtaggttcatccaacagcagtattcgctgctctctcaccagtgcagaggcaacgcttaagcgtcgtttctgccccatcgataattggtagggatggcgctcggacaggtcgattaatccaaattgattcaacatatgatcagtcctgacaagtctttcttccgttgtaagcctgccccccagcaatgagaattccacttcttccgcaaccgtgttggtcacaaattgaaactccgggttctgaaatacaaacgtaattcgatttgcaagctgctctgttttgccagaaggctgaccgtccacctcataatgacctgttgttttcaggatattcatcagagataacaacaatgaactcttgccagctccattagctccgacaataccaatccagtctccatgccataccttggcctgctccacctgaatgaaaggtgttttcccacgccatccggtgaactgctgcaagtccagtgcaggcagataggctggtgatacaggcgaaaaggatgagtcgtgagatatgggggatatacccagtgtatcgaataagccagacgattgctgtgcttccaaacttgagatgccgtgatccacacacacttgaagctctccagaagtacttccctcttctagcttagctgcctgctcgtgctcatcccacacacccggataccagattccataagccttcagcttaccccgttcatccgtaaatacctgctgtgctggcccatccgccacaatctttccttcaggtgataacacaatgatgcggtcgaccatatccacaatcttgtttattttgtgttcaacgatgatgatcgttttgtcactggcgatccgtttgacggtatcccacacctgggaagtcccctcatcatccagcagtgcagtgggttcatccaaaaacaatacctccgggtccatggcaagcattgaagcaatcgcaagacgctgcttcatcccctgagacatggactggatcaatatacgattctgttcaaaggataaccccacttgtttcagataatattcaatcagagcaggcatctcttcacgcggaatacttcggttttccagaacaaatgcgatctcttcatccgtaaaggacatacagaactgggtatccggatcttgaaagaccactcctgctttggcgggaacctgaatatcatcacatttcatcggaatctctaccgaacgtggtatcagaccgctcaaaatttgcaataaggtcgatttaccggagccactcgggccaagcaacagcactttctccccttgacgcacagaaagagacaagccttgaaataccaaggctttctctcccgggaacttgcatcttagatttgtcacacttaccgcttgcgaattcccctctccgctcatctaatccagcgcctcataatcctgtttggataccggtctgagtgagcgtgttacaccggtcagttccaatgctttggcgagataataagcgaacactccagcaatcaagatgcttccaatgaagcggaatccgataaataacgtgtagttccaggccgagagtgaatcaatatacccgtactggtaatccagcaaaagcgaagccgctgcggctcctatggctgcaagacaggtgacaaacagattggttttgcgatacaaaaatgcggcgaagaatatctcggctcccaatccttgcaacagaccgtatacaagtgtggacatgccccattcactacccagaaaagcacttaccgttgaagccgcaacctcggcaagaatagccacacctggtttacgaatgataacaaaagcaaacgtgcccgccataaaccacatgccgtagatcatctgctccgcatgaacgccaaatggtttcatcaagtcatatgtaggtccccatatcttgtaaatcaccccaaacactactgcgatcacgatggttaccagaatatccgttagtttcaatcgtttgttgcctgcttttgttgccatgttctctacgtccttcctttgttccctgtgggggttatcaaaataaacgaaaaagcctccccggttccgggcaggcctcacgcacagtggacaatcttcacaatgatgtattggatggatgtcgaaaatacggaatattaaccagcacccctccgtcatggcagatacaccaccacagttcaaagaggtctgtcgttcatccacgttcattcccacaattcacccttacatatcgcaaatccatgttctctacgctggcattacccagatcagatgtacggtcagcggcacaaggccactctctcagcccaacttcattgagctcccggttcacttatttcattgcttctaatgtacatcagatgggtatttgtggcaatccctagaaaaatcaaaagttggcataggaaaaggcatccccctggatgccttttggacatacttcaccatgtgaaatagctaccttatccgtacacgccttcaatccgtattccaaggtatccctgttcttaatattgcgtgttcccagactggctcgttttccccgaagcaaaccccttgaacaacgttggtactttggaataacgggtattcgtaattttcccttgtgatgtgctgctgtctgtacgcataatcgaatctttcacattggaaatgttggagttatccagcgtcatgttaactgcaaaggaagttccaccattttggcgaaccagtttgccaatatcatctgcacggaaatttttgatgttaattgttccagctgcattcatctggaacactttatcataagccttatacgctgccccaccggtaatgttaaccgttccggcagacttcaatgtcagtgcatcctcgcccacgtcctgccagaccacattcgatatattacagttgccataacagtgaacaccatcagcagctggtgatccaatgtttacgtttttgagcgtggcccctgcctccagacggaagactggcttctgattttctgcttgagatccgtcgccaagtgtggaaggattagctacaaatgttttgccttgaccatcataggtcgtgccctttggaacaacaatagttgaatttacaaccgtaggcgcagccgcagccggaactgcaccaaatatagaagcaaccaaaccagcggacagcaacaacgtcaacatttttttcataactttattcctcccttattctctcgttttttggtagcatacaagcctaggcttgtattggaagttcgtcagaggtgcacctctgtccgacccacaacctaatcctaccaaataaggaaggcaactagaataatcattagatcacgtttgtattttccagcatagagcctgatgtttcaacatgctttgaggtatcatgtctacttgttatgtaccgatatcaacttcggatatgctctatttaagccaccaaaagtttcctacaaaaaaagaaacccttagtctttttatagacagggtttctacatgatagatttaaaactaatctaagtactctattttactctagagtttccaattcatcttcgttaatttcatccgatggttgaagtgaagtgagtgggtcaagattggtaaattcatttactgtttcataagtaaccacaccctcttcagaaacgatcattctgagaacgacccagtatctttcattaccactggcatctgctacagtatacgttgcacttggagtggctacagcaccatggaacacgtcaattttggcaccagatttcttgattgtgcttgatccagagaaatgatgaacatagaatgtatacgttccaggaagtaaatgacgaatggttgtcgtttcaggtccgtaagacgttacatcatccaaatccaaatcaaccataagttcgccattattataatattgtttatcagagtagtacgtatggaacattccctcatcacctgctggacctacgaggtgtgaatccagatccactggatctttaccccaagttaacacgaagcgtgtttcatcttgtgtaggtatttcaatagcagtttgattctcacgtttattctccacatttactgccgagacaccaatgagataagttgtaatatattttgtatctccacctccaatttcacctgtgtagatgcctgggggaagattgatatagtagtttccttgagtattcgttttgacagtaccgacaatttcacctgttttgttatccaggccttttctaaacgaaatacttaaatctgcaaccggtgctccagctacatccttgatgtgaccaccgaatcctgtaagtttgattgcaccactttggcttcctgcaaaatgtgttttattaacatctgactccacagtgatgtacaatgtggctccgtagctattaatagcatcaaaagtaagttcgccattgcggtactgcaagttattcaattgttgttccgccccatcaaaataggcacgaactacgaaatcatttgcagtcagttcagaaacatccaaaccctcagaaaaattcaactttgcacttccatttgtaacttgaatccctttgagtgtcggatagactgttccttcgttatagactgctacggttactggaacattgatttcgaaatctccatatttggcttttaccactgtcgtaccgttgcctttagcttgaatcttgcctgagtcaacaatggcaatagtgctatcctcgacattccattctgcaatggaagtgatatctttaatcgttgaggtagcgatacccgtgaatacgatctgacgggtcgaatcaattgctgaaaactctgtttcttgaggtgaataaactatactagtcactgtaggatctacctcaatagctgggggttgattaagttgactaaaatcaataccttctacattgaccagagctgaagataatgttcccgctccagaaaattgtacgattgcatttaatatagcccgattcactacagcaccatggttaattttaaacactgtactcaatgcttcttggaacacttcgagatttccaatggtggagttatctccgaactccactgaaacttgttctgcatgaaccataacagagtcgaagcttccactgagcactaccgaagaattatggggaatcgactctgctatttcaatcggtccgacatcacctgtggagacattctgtacgattgcaccagatctaatctcaatctgatgaacatcacttccaccttcaaggaccaaacgaatactaccgtccgctttgtcaacaatcactgttgcaagaaccgagtccactgcatgaatactatttggtcctccgccttgaatctcagtagttcccgtgacattaacattatcaagagtcacgtcaccatttcctacggactcaagtatattcagcttaccatttattttggtgttttttagaacgacaccttgggaactaatagttatatttccagttacattaccaagagtatatgtacctggagcagagagattattactaggggcttgttccccgcctccactatttccaccattgttacttccgttccctttatctccggagctgctaccgctatttcctttactgttaccttcagaaggttttgctgtttcaggttttgcttcatttgaatcttcagtatcaatctctgtcttggcaggagccatgtaactatcatatgtagacttatttatcacaaactcatatgcaagtctcgctagcgcctgtcgatctgctatgcctgatggattaaattttactgttccatctttttgaactaatcctttgataaaaccagattgataggctagtgttacagaatctttcgcccagttagatacttgacccaaatcggagagttgtggtttggatgtttgactcgttacatcttgattgtcccaaccaaaggctctaacaaaaaatacagccaactcttctcttgtcacatttttattaggtgaaaagctatctttggaggtaccttgagcaattccagatttgacaagtgcacctacatatccggcataccattgatcttcctttacatctctgaattgacttgcttcgacattatcaggctttaaattaagcgcaccgaccataatctttgctaattgagctcgtgttaccgaatcggaaggtttaaatgtcccatcagtaaatcctgtgagtattccttgttctactaatttggttatttccgttttggcatacgaattatcaatatcagtaaaagaagttttagatgtagccacttctgccgatacagataaattgatagataacatagaaacaatcagagacgtagaaagcattaacgatagtttgtgattaaactttttccattttgaattcaaaactaaaacacactcctcagtaggcttctggttggtaaatccactaatatatgaatctttagaactaatacacctcctaatcaataggataataataccatgcaaattcataaaaacaagattaataaactatgattttacaaaaaagttgttatcctgaattgatttcaattcttattatctaaataatttcgcaataaagacaaaacgaacctaccgaaacaaatattttcggtaggttcgtttttaagtaaatttatatattctaggctccgaatctctgacgataaccgcactttcgacacaactcttccacagcttcccgcttggagaagccatataccagattgttcgctcgctcaccctcaataatctccgagaatgacttctcgtgcacattacccaggttaattacaccctcgccatcgagacagcatggaaccaccgttccatctacaagcacagctgcctgactacgcaatgcatggcagaaacctttgccgtcatcttcaggtgcatccaggcttggccactggaactcatggtcctgattcaggtatacattcggggcaattttgaccccgctgcctggaactactttttcctcaatgcggaagtcgagattgaattcacgttccaatacttcaagggtctcccgatttcgattcatctgagcatttgtgaagttatcctgtgtcagattccacaaccgaaatgagatgatcacattgtgcttaacggcctcgtgtacaaaggacaaaatatgacgcagatacccgtcacgatctgttgaaccttcatgcccatcgaagctgtgcagggagaaattcatctgccgcagcgccggtttgccaagcaatttatgctgagtcttgggcagcagtgtaccattcgttgtaatgttcaccttgagtcccttctcatgtgcggaatcgagcaacagatctattttgggatgcaacaagggttcacctttgacatgtagataaatatgattggtgtgtggtttaacttgatccagtatattgttgaagacttcagggtcaatgaatcctttggcacgctgtgtctgcggacagaagctgcatgccagattgcagatactcgtgatctcaatatatacttttttgaacgttttcaactcgggtccccattctgcttcggagggagaacaatcccgcctgcatttgtgatccggccaatatgcgccaccactattatatcgggttagggagcccaggtaaattgttcagttgttcgggtctgactccaagttcatctcaagaattctatcatgctgcctctttacagttcatgttcgagtgatatatgctgaacacacaactgcatatcttgaacttttgcactaggggagccttgcggctgagacgaatatgactattcggaccctttgaacctgatctggatcataccagcggagggaagtggagcggccttttagtaagcggaatttttcatgtatgtgaagataaattgccgatttaacttacagacccactcatttctccggaaatgggtgggtcttttttgttccttttgcagagacagaatgccgttgttattccagtagtctgacatcaagggggtgaggatcagatgaacaaccatgtaaccattgagaacgtaagcttcgcttttccgaaaaaaaaggattcacccgtgctcgtcaatgtgtcacttcaggttcaacaaggagaatttgtctcgctcatcggctccagcggatcaggtaaaagcacactcttcaagctgctcgcaggcttgcatgagccaaccgttggcaccatcgatatagctgatgtaccgcaaggacaacggctcggacgagtcgcttatatgccgcagaaagatctgctgttatcctggcgtaccgtcatggagaactgcatgctgcctgccgagcttgcaccaggccgacaggacaaggacaaactacgagccgatatcatcgcaggattggcaaggttcggcttgtccggttatgagcaggcctatccagatgagttatccggcggcatgcggcagcgggtggcattgcttcgtaccttgcttacaggcgggcagctcatgttgctggatgaacccttcggtgcactcgacgccttaaccaaacgagaaatgcatcgctggttgctcgagctgtgggagggctttggccaaaccgtgatgttcattacacatgacattgaagaagccctgctgttaagtgaccgtatcattctgttaactctagggaggcaaggtcagcagttgcgggagatgacggttcctttaccacgcccaaggcattcggacatgatctacgaactggctctcgtgcagatgaggcaacaactggaggaacaattgcatgcaaaatgatagagctgagtttagcgtctggacgtggtgttcgaagtggctctcgaaatggttttcccaatatggtttgtttattatgctcatgttcttattactggcgatctgggaagtgagtgtgcgtatgggttgggtgccctccttcatcattcctgcacccacggccatcaaaggctcactggttgaacatcgtcgtctgctgttgaccatccatctgcctgctacctttatggaggttactgttggttttggcttgtccatagtgactggaattacgctggcaacaggcatgcatatgaatcggtcgattgaaaaggccctatatcccttcatcgtgatcagtcagaccatcccgctgattgccttgtctcccgtgttcatcctgtggtttggctatacgttgtggagcaaagtcgccgtggtgttcctaatcgcgttcttccccattgtggtcagtacctacgatggacttcgccaaggcgatccggagcagcgtgaactactgctcaccatgggcgccaacaagtgggatattttttgcaaactccaggttccgctggcacttccctcttttttctcggggctaaagatgtctgtggtgtactgcgtggttggggcaacgattggcgaatggcttggtggtagcaaaggtctagggtacttcagccgtcgtatgtccagcaacatgaacacggatgcgatgtttgccgccattttgctgttatccctgcttgggatcgttttgtttgtactgattgcctggctggagaaacggtttaacatacggcgtcaaagtcatggaggcaaaagaaaggttggataatacttatacagaaatttgatgtaaatacaggagttacgatcttcagaacataccttatgcacaatttcagcagcatcttcaatcagttcattgtcacattgtcattaacatgctgttgtccattttctacaaatcaaaacgacgaaatgaggaacttcatttatgaataacaaaggtatatactccctgcttcccatcatactcattacccttttgctgatcgttagcggatgcagcaacacgaataccagcaaaaacacgccaacaacagactctgcaaccaatgcacaacaaacagacaagtctgcaaccgaaacagcatctgacgtcaaagataaactgtctatcatgctcgactggtacccgaatgcagtacactccttcatctatgtggctcaggaaaaaggatactttgcagaccaaggtctggatgtcgatattcagatgcctgcggataccaatgattcgctcaaacttgttgctgccggaaaaattgatctggccttaagctaccagccccaaatcttactcgcgcgtggcgagaacattcctgtacgttccattgctgctattgttcgacaccccctagtgcatctgttgaccgaagcgaatggcaacgtaagttcacccaaagatcttgaagaaaagactgttggttattcctccattcctctgtacgaagcgatggtacgcacgatgatcagtaaggatggcggcaatcccgacaacataaatctggtcgacgttgggttcgatctgattccttctctggcttccggacaagcggatgcgattatgggtggttttattaaccatgaacaattgattttggagaaagaaggacatgccatgaaatcgattaaccccgtcgattatggtgtgcctgattattatgaattggtcctgactgcaagtgaagctggcattgaagcgaaaaaagaccaacttacccggttcgtcaaagcggtccaggaaggacagaaatatgtgactgagcatccagaagaagccttgagtattctgctcgctcatgagaatgaaacatcaccgcttgacccggagatcgaaaccaaaagcctggcaattctgctaccactcatgaatgaagaaggccaaccatttggtcggcaggaaatggaatcgtgggaaaatgtacgtgcatggctcgttgaacaggatttgattcctgaatcggtgaaagccgaggatgcttttattactctgcaaggagagtaaataaaggagagcaacgcgaataaaggaaaagttagcaagaacgtgaggatcggatgcatataggtttgtggaatggaattggcttgaagcaagcatcggaggatcagaatttataacaagcctaagtggcttgatgtgcaattgggcagctagatatgcgtttgactggcttgttgatatgtatttggtaatgtaattagcgcttatcttcaagcctactgggagctgaaacgctccttaacttgatcgaaacagagcatgctacgaccgctaacgaatctgaggcgtcctattcagggatttggagcggttgcagaaatctaaagaacctgaaacatgttatatcagaataaatagctgtttgcagcgttttggtcaggagattctgggaataacgtgtctgatgttccttacatttcaaaaggaggacctgacagccaaataagacgtcctgtgttctttagaaacatcgtctgaacagtcgtgccccgatcgatcgtgcccaaatcagttgggtatcgaccagcctggacttcaagacaccggttggatgctaacatccatcacagtattgcttgcctgagtttggggaaattcactctgttcactttctgtattttgtatcgtttcgttttttactgtttcgtatgtgtactgttgtctatctgcgaatttacattttatacggatccacctattagctgtttcaatcaagactggatatcgatcaaaatgattcaatctgtctatatccagttacaaaaatcctttttagtgagttagaaattgatttaaatttaaaattttagattttacgtttctgcttttcccgcattaatgatctggctgttgttagactctgcgccccaactcaacaaggagactcatatcctattattctgctgagtgacccttcataccggtcttctaccgatggtgttacttcaaaacaaggaggaaactatatgtcttatttggaacgtgttcgtacgcaaaatccgctcgtccataacattaccaaccttgtcgtggctcccttcactgccaatggtctgcttgcactcggtgcgtccccttttatggcctatgctcatgaagaggtcgctgatgtcgccaagatgtcaggagctgtagtactcaacattggtactctcgataacaaagtcgttcaggcgatccgtctggctggccaatcggctaatgcgcatcacgtacctgtagtgcttgatcccgttggcgcaggcgcaaccgcctatcgcacggaaaccgtgcagatgctcattcgtgaacttcgtctcacggtactgcgcggcaatgtggcagaggtcgctaatgtcatcggtgagagttggagtattaaaggtgtggacgcaggatcaggtgagggcgaccgaatcggcattgcggagcgggcagcgcataaacttggctgtgtcgtggtcattaccggaaaagaagatattattactgatggacaatccacattcctcacgagtaatggtcatgccctgctcactcaggtcacaggtgctggctgtctgctcagttcagtgattggcgcttttacagccatagcggaatcaggagccgatcttctaggcagtgttgttgaagcgctagcgttttatggtgtagcagctgaactggcggcagagcggacagctcatcaggggccgggcagcttccagattgaattgttgaatcaactggcacaagtaacaccagacctcttggcagaacgcgcacagatccgtcaaatccgtggaggtgcagtatgagtattgctcaatcgctaaccattgcaggctctgataacgggggcggcgcaggcattcaggctgatgtgaaaacgttccaggaacttggggtatacggcatgaccgttatcaccgctattgctgcccaaaatacaacaggtgtgcagggcgttttccccatcccttacgatggcattgcccagcaattggactcgaccggcgaagactttcaaccaaccgcaacgaagaccggcatgttatatagtgccgatattattcgtctagtggctgagaaatggcagcaatatcgttggtcgaatctggtcatcgaccccgtgatggtagccaaaggtggcgccccccttctacagcaggaagctgtacaggcgttggttacggagctgttgccccatgccctgatcacaacacccaatattccggaagctgaactgcttaccgagatgtctatcaccaatctgagccagcgggaagaagccgcaagacggattgtacagatgggctcaacgtatgctttggtcaaaggtggtcatgatgaaggaagtggcatgatcgtggatgtgctctacgatgggcagtcttttcattatctggagaatgttcgtgtggtaacacgtcatacacacggaacggggtgcacatactctgcagccatcaccgcagagttagccaagggtttacctgttctggctgccgttacgaccgcgcgagcatttattcaggcagccatcgaagatgagctggggattggggccggacatgggccgacaaatcattttgcgtatcagcgcagacagcggggtgagcagtgatgcacccttggaatgcagaagcggtacgacgcgcgatgcaggtgtatttagtgatgggcagcgtcaatacaaagcaagaccctgtggaagtgctgcgccaggccattgctggcggcattacgctgttccagttccgtgaaaagggaactggcgccctggtcggcgaagctcgcatcacacttgcgatgcggcttcgcgaggtgtgcagccagcacggtgtcccgttcatcgtgaacgatgatgtggagctggctgtagcggtggaggccgacggcatgcatgtcggccaggaggatgcggacgcggcgctagtacgcgcccgcattggagatgggcggatgcttggcgtatccgcccactccgtggatgaggcgcgccgtgccgtgcaggcgggcgccgactaccttggtgtcgggcccatgtacccgacgccctccaaagcggatgcccacgctgtgctgggccccgcagtggtagcggaactgcgcgccgcaggcatcgcagttccgattgtgggtatcggcggcattacgcccgataccacggccgccgtgatggcggctggagccgacggcgtagccgtcatctccgccatcgcgggcgcggccgacgtgcgcgcagcggctgcgcagttcgctgcggcagtgcgcgggatgcaggcgtagccctgctctccctgcactgccagccccgtgggctgcaccgaatacatggtgcagcccacaactgctcacgctcctctccatagcagaggagcctcccccctgcaacgcggcagtctatgtcttcgacttagaagcgcatccgctcccctacagtgactgaatgttataataattcagtcatatccagtcacatcctgtcaccaatccatgatcaagatgcagcttccatgctcgcatcttgttttttcattttcaacagttgactctcacgtaacgtgacactgtacaatcggtgttgtaaggaggtttcacacatggccatgaaggtaaaagaagttgccgaacttgcctcgatcagtgtgcgcacactgcatcactatgatgagatcggactattaaccccggacgaagtaacttctgccgggtatcgattatattcagatgccaacctggaacggttgcagcaaattttgtttttcaaggaactcgacttctctctgaaggagatcaaaaacattataaccaacccctccttcaatccggaagaagcacttaaaatgcatcgacttattctgctggagaagcgacaacgcttggaccaaatgattgctaccattgataaaacggttttacacgtgagaggagaaattaaaatgacagccaaagaacaattcgaaggatttgattttagccagaatccgtatgaacaagaagcgcgggaacgttggggagaccatgccgttgatcaggcaaaccagaagctgcacagtaaatcaaccacggatcagaaagctctatccgatcaaatgaacgaaatctacaagcgtctggccgcacttcgtcacacagaaccagcatctgccgaggcacaggccggtattcaagaatggtacacctggctgaatcagatgggaagctactcgcctgaagccttcagaggacttggtcagatgtacgtggacgatgaacgcttcacgcgtaatattgatcagtttggcgatggtttggcagtatttatgaaagatgctatggctgtatttgctgaccaaaacaaataatatagacctgtcttcgaccacatacagtttattcaactctcattgtcgtcagatgtgtactgtaaacgatagtctggaaattaaacctctgtccgtagtgataaaagtaatctctcgtcatcagctttatcgctgtacatgacatcaggacatttgaaccttcctcctgtggtgaccgtccttcttgtaattaccttttgaaaatgctgaatatatactagggttacgttgtaaataaattggatcgatccgagttactacagccattatgagcggataatcccgcctactgcccagtgtacacacaaaagggacgtacaccctcaggcgtatcgtcccttttatgcatgcaagtaactcagccgcaatgtgaacaagcctaactgctgctcactctgagtactctataaatatcttttaaagtagatgctctttactacgtttttcttctgctcccagtccttcgatataacttcataagtgcttaggatgatgagcattaagtttcttctgtcaaacgttcttcattttgcaaccaagcgtccaccgtctatccgattaagctcttggtgcgtgatccgatgaagatgcatccgtagctagactggttctcgccatccggccaggaatctgccatgcagacacaatcgcaagcacgatgaataacaaatcaatcggttgactgaagtactcctggaaggtttccacaaacgcactgatcatctcgctatcaaacacaagttccatcacgccgacatcaccaaacagttcggaagtaaaataaacgaccgtcagatatttccccaacaaaatgccgacaagtgcaaacagtacggcaataatcttatgtaccgtcgcaatttgtttattggagaacaacacaactgcgtaacctgtgagcgctccaatcagaatcgcaattaatcccacctcataatcggtcattgcagcaatagctgcccatacgatgcctcccagaatggctgcaattaagccaccaatgatcggcataccgattttaactccttgtttctcttccacgttgtctttccctcctgagtcatgcatatgcttcttttccagaattcacctttcctatgaaaccacaaaaagacttattattcaacatttttctacttttggttccatgtatttacataatagaaaagatatattaagcatccatttccttattcgctcgaatatcattttagttttgtccactaacctctcataatcattcccttggcacataaaaaaacacccctccaacagcataatagccgtagaagggatgttgtccatatctgtatcatagatataaccaatgtaaccgagaaaactacattgaaaagctctctctatcttacctttgcacttccttggaaggctgaatgacagctgcaatctgtgccaaaatggcatccaccgatgccggatcatgcacatcatactcatcaatgttcagacgcagcacagggcaagctgtaaactgatcaatccacacggaatagcgctcgtgcatgtgttcccagtacgaacggtccgtctgaatctccatctcgcgtccgcgttccgtaatacggtttaaaatcgaaggcagactgccttccagatagatcagcacgtctggatgtgggaaatacggtgtcattaccatcgcttcaaataaactgctgtatgtctcgaaatctgtagcagacatggttccttgatctgcatgcatttgtgcaaaaatgcccgtatcttcatagatggaacgatcctgtacgaatcccccacctagttcaaaaatcttcttctgttccttgaagcgctctgcaaggaaataaatctgcagatggaagctccaacgctcaaagtcatgatagaacttctccaaatatggattatgatcaacttgttccagagaagtcttgaaatttaaacgctgtgcaagcgcagccgttaacgtggatttgcccactccaaccgtacctgctaccgtaattaatgcattcgttggaatgccatagttattcatatgatatactcctttacctgattaacaatttgcctgaagtgttcaggatgttccacaaagtcgagttgctctgcattgaccttaatgattactggcggatttgtgctatttgccagataatccatgcctgttttgtaatcggcgatcagttgttccatatatgccgggtccatatcctgctcaaatgagcgtccacgcttgttaatgcggtacatcaacgtatcgagttcagcttcaatatagagcaccaggttgggctttggcagatcatctgttaacagatgatagatttgacgatatttatcccgtttcgttccctttaaggtacgatcggcaaaaatcatatttttatagatatgatagtctgaaatgactggggtattctgctctacataatgaacgcccgtgtcttccagttgtttaaaccgattacacagaaaaaacatttccaattggaaactccactcgtcgatatcctgataaaaggaagccagaaatggattctcttctacgatttctttaactaacggaagattcaattcatgggaaagcatcgttgccagcgttgttttccccgctccgatcggaccttccacggcaataaacggggctgatttcatcgtgttcactgttcctcctcgtacttatgcgtgtttccgttttctatatagacctcacctattgtatcacagctttaaggattggaacgccagtattttatgtatataacaagtcaaatcacaactattgaattacattaaaataaaaaagacacactcgatatcatcaagtgtgtctttagatt

SEQ ID NO: 4 - DNA, 624943 bp, Paenibacillus xylanexedens
  source 1..624943: mol_type = genomic DNA
ggatcaaactctccaataaagtattgaaaagagcgataagctcattttgaatctgacgattcattgtgaatcataagttactatccatttgttcagttttcaaggaacttgtatgtccgtttatgttgatgtttgtcaaccggacaggaatcttatcatatcatgttaactaacttactgtcaacactttttttcgtcatctttcaaatgattatgacaatcattcgtttgaagcgacaagaaataatatatcatgtagtgatttatttagcaagcatttttaatcaaccttttgatatcatgatatcttcatctaaagtgtcttgtttccaacctgtattcgacagattagcacattctctgaacccaagatgggataacgatccctgcccttctgatggtttgaagaaagtgatccaaaaactctataataaggtatatagatatagagataaggttaagcagtcaagtgtactactttcataagtagcctatgaacaatcgtataaccatctcgcattgcacctttacacagatcacgtactccattcacagctagctattacatatcaaagttctgaataaactcattactaacctatatggggtgatcgcacttgaaacaatggttgaagaacagacgcaaaggttacggcaaaaagttggtttccatccatgcttggaatgcctggattgttgtgatccttgctataacaggtcttatgctggtaggcggcttttggcgcgagatactcggaattggacgtgtctggttaaaatggctacatatcatcgttgggctagctatgctggcacccgtagtatattacttgattttggccggaaagcactggagacagcttcgtaataggccttggcaaagggtgaacaccatctttgttcttgcgctgctggtaggctggctactctcgggtattgtattatggcagttcaagctagctggacctcgatggtcgaatgctgcacttttgatccatgacctgctgacttgggtgggcttaccttatattatctatcactccatcactcggaccaaatggttaaaggaccctgcacgtcgtgcggttaaaaccactacaacttcaacacgaactcaaaatacagctgatccatctgattcaatatcggatgaaaaagaaactccggctgctatatcttcttcccagtttgatcgcagttccgagagagatcccttcaaatcagaggagcgacctcaacctttgtatacacgacgagctttcattcgttctgctgtgggggttggtctcgccgtgactcttggtcctacttttatttcctgggtaggacgaaatctcaagatcgataacagtattgatagcatgctggaaaacgaccctaaccgtatggttcctctaccacaaccgctgtctgcctcttcacctcccattggaggcggagctgaaggtcatttccgcgtatatacagttacgcctataccggccttctccaatgctaactggtctttccgaattgatggactggttgaacgggcacaggtttggaattgggaacaattcgtgaagctgacgcgcaccgtacaggttagtgattttcactgtgtaacgggctggtctgtatataaaaatacctgggaaggcatttctcttgcacagcttttgaaacaagccggggtcaaaccggaagctcatagtgtgaagttttattccggtgatggtgtgtatacagatgcaattacgatggatcaagcgcaaatggaggatattatggtcgctgtcatgcatgacggcaaacccatccctgctgatcttggcggtccggtacggctcgttattcctcagatgtatgcctataaatcagtaaaatggttgaatcgcattgaactcatcgacagcgaacatatcggttactgggaagaacgaggatatgataaggatgcatggcttacaggggcatctcagcgcatccctaacaatttaagtggatcatgatgagataagataagattggtgagcgttctttcgttgtaaaaataattcaataaacagcaaaagcccccgatcacatattcgtgtcttcgggggcctttttctttttcctaattatgaactctctgattacactttaaccctgtgggttcaaaagacgtacaagttcgtcctcatcctcaatcgtaggaatgccaagatcatgggctttggttagtttactacctgccttctctccggcaataaccaaatctgtctttttcgacacactgccagtcaccttcgctccgagcgcttccagtctttgcgttgcctcttcccgcgtcaattggtgcagcgttccggtcaagacgaccgttttaccactgaagaaggaatcttccacaacagcaacggctggtgcctcaggtgcctgagctttcacgcccaagttaagcattttctcaattgcagcctgtgtaaacggatctgcaaaaaagtttacgatgctctctgccacaataccacccacgtcgggtagttcaaccagttcttccacggttgcattcataatggcgtgcagatctcgataatgatcagcgagcatgcgcgttgtcgatttacctgtgttcggaatacccagtgagtataagaaggaagccaagtctctatctttactaagctcaagcgcagcgataaggttgttcgctttcttttccccaaaccgctccagcttcaccagatcatcaaactgtaacgtatacaggtcggcaggctcacgtacgttcaattcatcatacaactgaatcgctgttttctcactgaacgtctcgatgtccatagcatcacgggaagcaaaatgggaaatacgtgccaccgtttgtggtttacacgcaagtctattgttacagaacagatgcgctccgcgttgctccagtgggaatccacatgcaggacaatgctcagggaagacgatctcctcaccatcactctcctccgtcactttacccagaatctcaggaatgacgtcgttggagcgacggataaagacccgtgtgcccagagcaaacttcagatttttgcgctcaatatcgccgacattgttcagagtacagttctgtaccgttaccccggcaagttcaaccggttctacgcgtgccagcggagttactttgccagtacggcccacattccataccacagcgttaagaaccgttgtggtctcttcagcctcgaatttatatgccaccgcccagcgagggaacttatcggtataacccaacacttcgcgggtgcgcatgtccgtaattttgataacagctccatcgatcagatagtctagctgccctcggttctcctgaatcgcggccagttgttccatcacatcatcaaactcatggaaataagtaatcgatggattaactttgaagcggttctcacgcaggaaatccatcatctgctgatgattggcaaactgaatgtcatccgaataacctacattataaaaataagcattcaaccgacgctcagccgtcgccttcggattcaggttgcggagcgctcctgctgctgcattacgcgcatttttgagcggctctgccgctgtctcattgtatcggtccaagacagacagattcatgatgccttcaccctgtacttcaatcgtaccgcttgtgtaaggaattttgagcggaacggatcggatcgttcttacctgtgccaaaataccttcacctacggtaccgttccctcgtgtagaggcttgcaccaactcaccgttggtgtatgtcaggttcaacgtcaatccgtcaaacttcaactcaatgacataacctggttccggtaaaggcgtatcgggatttttactgttatagtcattaatcagttttagtacacgggtattccagctccgaagctgctcaatattctgtgctttgtccagactccataaggaggataagtggcgatgcggggtaaaccccttgagtagttcgccacccacacgctgtgttggagaatcaggcagaaccatgccgctttcctgttccagcgtaaccagttcatcgtacagaagatcatactccttatcgctgatctgtggctgatccatcgtgtagtactgataattatgctggttcagctcggtaacgagttgctccatccggtgcatcgggtccatacagggccatccctccgttaatttgatctatgtagaacgaacactcctattgcactgaactgtgataacagaaaaacgttccatcgttgatatcactacataatttcaatgaatgaatatccacactgacactccgataacagaataactttccgatcgctgttatccccggatttcttttaatccattttaaaaggtggaaatccggggataaaggcgaacgctatgcttcttcaagttatttctgctctctccgttatcgtgcaaaaggaagtttcgttcttattctactttcgtaataggggcaaagcccgcaagcaaacgtttcacgccaaccggagccgggaaggcaatctgcagttcggtatcattacctgtccctttgaccgcaacaatggtgcctgtcccccatttgccatgctgcactttatctcctgccttgaatcctgcttcaccatcagaagctaccgacttggaagcagatgatggcgtagaatatgttgggcgggagacacttgtggtcacacgcgaagttggcgtggatgaggtagcagatgaaccgcttttactttggtgatcgaacagcttggtgccaccaccgaagttacttcctccactggaacctagtccgcgtccaccatatgagcctcctccgctactgccacggcggtaacgatcacgagccatggaggtgtcttccttcagctcatccggaatttcatccaggaagcgggaaggcgggttcgctgttgtacgtccaaacaacgtccgcatctgtgcacaagacaggaaaagttgctcttccgcacgggtgatccctacataagcaagtcggcgttcttcctccagctcttcattgtccataaaggcacggctatgcgggaagactccttcctccatacctacgataaagacaaccgggaactccagacctttggcgctgtgcatggtcatcagggtaaccgcgtcgctctgatcctcttcatcatcgttcatgctgtcgatgtcagcaatcaatgcaagatcggtgaggaacgacacgagcgttttatcttcattatttttctcaaattccatcgttaccgacaggaactcttcaatgttctccagccgtgcacgggattcgagtgtgttttcattttgcatctcaagacggtactggctcatctcaagaatcttctcggtcaattcagttacagacagatactctaccatctgatgcaacgcagcgatcatgtcatagaactccaccagcgcattccgcgtacgaccagcaaaaccaagatcatctacgacctgaagtacacggaaaatagaaattccacgctctcctgccgcagccgcaagcttagctaccgttgtatcaccaatgctacgtttcggtacattaatgatccgggtaagactgatatcatcgtccgggttagataacaggcgcagatacgccagaatgtccttgatctctttacgatcatagaacttgatgccgccgacaatctgatacggaatatcagacttgatcagaatttcctctataacccgggactgggcgttagtacggtataaaatggcatggttctgataggatttgccgttcttcacatttttactaatctcggaggtaacaaaatacccctcatcatgctcggaatccgcacggtacaccttgatcttcgagccaccctctttgtccgtccacagtttcttcggtttacgccctgtattcaggccgatcacttcattggctgcattcaggatattggaagttgaacgatagttctgctccagcaaaatcgtgtttgcttcagggtaatctttctcaaagttcaggatattgctgatgtccgctccgcgccagcgatagatcgactggtcactatctcccacaacgcagatgtggtggtgactgtcagcgagcatgcggcacagcatatactgcgcacggttcgtatcctgatactcgtccacgtgaatgtactggaatttcttttggtaaaagtccaggacttccggcacttccttgaacagttgaatggtctgcataatgagatcgtcgaaatcaagtgagttgttggctcttaaccgtttctggtacatcttatataccttcgccacaataccctcgaaatagtctcccgactgcttctcatattgctccggactgatcagttcattcttcgccgtgctcatcatcgattgaactgctttgggttcgaatttcttggtatcgatattctgatctttcatacagctacgaattacagataattggtccgatgagtccaaaatactgaagttggaggtaaagccaatacgttcaatgtcacggcgcaaaatacgcacgcacatggagtggaacgtggatacccatatgtcgcggccctgagatccacctacgagttgggatacacggtcttgcatctcacgggcggctttgttcgtaaatgtaatcgctaaaatgccccacgggggtgccttccgtgttgcaataaggtaggcaatccggtgtgtcagcacccgggtcttgccggagcccgctccggccataatcagcagcgggccatccgtcgcctcgacggcttgccgttgaggggtgttaagccgtgcaacggcatcatgtatatttacaggttgcatgcatgcatgctcctttcgttggttggtcggtataagtgatctatccattacacttggacttcgattgcagcagcatcttccgatcgtcgttatccccagattttttgattccctgtatctaagggaaaatccggtgataaatacgaacacttcgtttcttcagattgcttctgcactctccgtttctgtgtaaacatagtccctgtatacgaatttcttagtaaaagaacaaaatcaggtaatagaagtatgcttaggatttagctttcttacagaaagcttttaacgagcatttcgtttctccagctcacttctctcctcttcgttctcgtgtaaacgacattacgctcatataacttctttaattagtaagggcaaagttctattttaacagatcatcaggggaaaatgggggaatggtaaactaaaccgattaaatggttccttttacagccaacaccgtctcaagtgccttagtcaaatcgctatacacaatgttacctaccacgatggtatctgctacccgagcagcttgcgcggctttctccggattatcaattccgccgccgtagatgagatgtgcccgctccaattgtctgtgtgtctcaccaacaagctccatatctccgaacgttccgctgtactccatgtaaacaatggggagattgagcagacgctccgcagcctgggcatatgctaccgcagcccctgtcgtgagttccgtatctgcacccgtcaaccgcgctaccgtggagtttgcattaagcacaatataaccctcggcaatcagcagatcccatgggatcagataaccgtaacgctctatggcctgctggtggtgcccaatcatccatttgctgtccgttgcattcaggaccatcgggatcagatatccgtcaaacccgggaacaacggcctccagatcggatacttcaagcacacagggcaactcataacgacgcacacgggacatcaggtctaccgtgttatcataagtaattccggaagatccaccgacgataatcgcatcggttcccgacatgcagacctgatcaagttcttcatccgtaatctcccggtccgggtcaagcttaaacacatgtctccactgcttaatcatgtctatcaacgaacattcctccagaggttcttctgcatcctagaaagcttgtaaactaagtctaagtcagcaggcatcgagtgtcaatgttcgtataaaaaggggaacagaaaatcacagacatttccctgttctggtatggaaaagcctgtgatttggattttgtattgtaattacgacattctacggtttccatgcaaaccgtgtattcatctcatccagttcctgctccgtcagcacgtccgagtacaccccgtacacgccccacttctcatagttagccacctgttcagtgtcattgatggtgtgcacgtaggtaactgagcctgcactattaagcttggcgacgaaattttggtttactttatattccggcatagtcacggcatcaatatcattcttttgcacaaaatcaacaacctgatcttctgtatcctgtgtggcatataacgtatagataatggaagggaatgcatagacttctttcaccgtttcaagcatgggttcgttatagatctgtacaaccacgcgatccagcacggagggatcatgttctttggcagcatccacgagggatcttaacacctgctgtatatcttcatccttctgttccttggtgtcggttacgatatacatatccgggtatttagccagtacatctataatgccatcggcatccataggctggtacatacccagaataggcgtattcataaactcatcatgtgtcagcgccccagcctgtttatcctccgaaagttcttcatcttgtcctaacattttgctcatattcgcggtccattcatgtctggctacggctttacgatctgatgtgagcataaagtcgatctcaaatacacgtgtgcctttctcgtaattggcaatcattgcttcataggcgttggtatatggctgatcccgaatgctgcccatcgcatgggcgattaatctataagcggtaaatccgtcacgctgttcctcactctcgctttcataggcgaaaaagagtgtacccacggtaacgatcagtagtattaacacggcggcaatgcgtttcatatcacattcacatcctcagtacctttttgttagctaactacccgaattgaggaggtgcaaaacaaaatagccacccggaggcggctgttaaatggtgggatgaaagattgtaaatcaataccattaggtaatcctaatatgcattcttgagaccatttcgaatggtttcccatatgattttgatatcaaataataaagaccagttttcaatataaaagatatcttgttcaattcgatcctcgattgaggtatctcctcgtagtcccttgctctgtgctaatcctgttattcctgggcggacgtggtgtttgatcatatatttcggtatttcgtctcggaattgactcacatagtaaggacgttctggcctagggccaactacactcatatgaccaagcaaaacgttgaaaaattgaggtaactcatctagacttgtgcgtctaataaaagtgccaaaagccgttcgtcgcgggtcattcttggtggaccaccctgtgtccatcgtgccctcaggaatgactttcatcgagcggaatttgaacatcatgaagttgcgtcgattaagtcctactcgctcttgtttgaagatgacgggcccagaagaagtaagacgtactcctaccgcgacaacgaacataaccggagaagttaagaggatcgcagtgagagagaaaagaatatcgaaagttctcttcatcaatcggttcaccgcaatatccagtggaatgtcgcgcacgttaatcatcggcatgcctgcgaaattatcaaaatgaggccgtgctggcaagtaatcaaagaagtcaggaatgattagtgtcctaacccctgccttctcacacacattgataatatgcgaatacttatcgtgagcatccagaggtaatgccagaatgacttcatcaacaagatgcgtagacaagaactcttccagttcgtctattcggccgagaataggtttgtatcttttctgttcactctcatcccagtgacgataatcatccataaatccagttacttcgtatccaagttcgggataatttctaaggttatcatagaaacgtttacctagtgatccagcaccaaggatgagcacaaactgacggttaaatccttttttacgcaagcgtttcagttgtactttcactatataacgatagaacagtgtgaatgatacattaccaatcatatacatggcgagatatgcacgagagatgtttacttccttgaaaaagaacatcagactcagcagcatgaagaaggctataccatgagattggagaattttccaaagttcgtctacaaatcgttttttacgcttggctatataaagagaggacatcagtcctgtgatgatggcaagaactgcgtaaaccaagctccacatcatatatttctctataggtagtggattttgattcgttaacaggtcactctcaaatttcagccaccatgccagcaagaatgaaagctgaatcacgccaaaatcagccgcaatatacaattgggttagaaatcgttgattacgccgaatcatgggttcacctcggaagatgcttcattttccgctctcaggcgggtttcagtccgcaattgacgggaaggaggagacaacttgctgcgtaataaagatagcgtgaacttgagtgaaatccccatccacacagttgtattcgtgagtagattgtatttcttcgcgtagtgtttgcgatggaacacccacatcgctctatgaaactcatacgttattttcaaaggtttacgacgagcactgccgcccttatagtgcacaatatatgtacgcggataataaaaaatgccccatcccgcttctttgatgcgataacaccagtcaatatcttctccatacataaagaacgtctcatccaacccgccaacctgctcaatcgtctcacgacgcacaagcataaatgcaccgacaagacagtctaccggatattcatcatccggactgagatgtcccagttgatattgattgaacttcggccgatccgggaagagacgagaaataccgaatgcatagtagaatgatgccgatggtgtaggaaatccacgcttacaagccttatccaaggagccatcaggaagaatcaccttgcatccagatgctcccatctcaggatggcgatccatgaaatagatcatagtgtggagtgtatctggctggacaaccgtgtcagaattgaggaggaggatatagcgtcctttggctacttccattccttgattattggctacggcgaaacctgtgttgttttgattagctataagttggacgtccgggtacacctcacgaatcgcttccaccgaaccatcatgagacgcattgtctatgacaataacctcgtattggtaagaggtttgggatgcatacaccgatgccagacagtccagtgttagctggcgtgtattgaagttgacgatgatgatgctgacgtcaagaaggtaagtattattcattttcgatgcctccagcaaaggagtatctgttgtttgaaacattttaaaaactcctgactttatctctatgttaactactgaaagtatagcatatcatagatggaagagtgggaatcaaaggcaatatctcgatttatattttcctcaacacgtatataagcttaagaacaacgtcatctaaaaatgcttggcggtaaaaaggcattttaaccgcataaccaattcttttaaacccattgcaatccagttgttttaaaaaatgttgcaatttctcttgctgatgtgaaggtaacttatctctatagagttccaaaaacaatctcgcttgtttactcaaaattgaatgattctttccattcacgaaactgttccacctgttcttccattttatgaaccatttatcattgctcccgccaagaacattcccttgatgttgccgatacaaaatggttggttcttcatcaaagatcacttcaccaaaagagctaacaaacaggtatatccaccaatcatgcataatgatgtgggttagattagacgggacattcgccctgatctgctcgaatgttaatgggttcaagaccatagtacaaccaacacaacagttttctaccagagcattatacatgctgagcggctttggaggcagatgaggccatacgttcagatggttcaaatcctgatctaccatttgtgtagaagaacaatacatcagcggtacgtctaatggccccgactgcaatttcacgacagctctactcaatttgtatggcttccacacatcgtcttgatcacaaaatgcatagaagtcgtaaataggctgagtttgtcgcattaattcaaagaaacttccgattacgcctacattttcaccatcaattatacgaatctgatccggatatgccttggcatacccacgaatcttctggatagtttcatcggaagaaccatcatctctaatatgaatgcggagatctacctgactctgtgcaagaaggctttcgagttgttcatcaatgtactttgctccgttatatgtagaaagcatgacacatactttaggctggttcacgtttcacctcaaaattcaacttttcttcattatatacgaaaactcccgcccagaaataccagagcgagagttacctaagaggatgttataattatttcgtttctgacaatgaagaaataaaatcttttagtccgtcccgccatgggcggagctctgtcaagccatttgtccgaatggacatatggtccatcactgaattgacaggcctaggagccggtcttggaaactgttcggttgtgcaaggttccaattttgcttgaatggatacccctccggtggtttgagcctcttcaaatatagcctgagtaaattcataccatgtgcaggtaccactattggaggcatggtatattccatacatttctgttgccatgagttccataaggaatcctgccaagtctaccgtatacgtaggcgatcctttttgatcatggacaacctgcaattttggtttttcctggcccagcttcaacatcgttttaacaaaattatttccgtaaagtccgtacacccaagacgttcgtacaacgaaccatctggaggacaacgattgtacaagccattctccagcacgtttggattttccatacacgctttgaggattcgtatcatcatattcctgataaggaatcgtcgaatgcccgtcaaaaacgtagtctgtgctgatgtaaattagcttggctccaacctgttctgcagctacagtaacattccgtgttcctactgcattaacctgatatgcaccatccgtatcggtctctgctgcatccacagcagtataagctgcacaatgtataatgacctctggatgatatgacgatatgacgtcattacattgggtttgattggtaatatccatctgatcccgatcacatgctagaacatcatgccccactttttccaaaagaagcaccacatcacgtccgagctgtccgcttgctccagttaccagaaccttcatgccttggcatctcccaaacgagaaccgtattgtttttcgtagtaatcctgataagcgcccgattgaatacgagtccaccattccttattatcgagataccactgtatcgtttccttaattcccgtctcaaaattatgtttgggcttccagccaagctcagtcattgttttagtcggatcaatgccatatctgcgatcatgtccaggacggtcctgtacatattggatcagagattctggtttgcccagttgctccaagatggtttggacaatgtgtacgttcgttcgctcattattgccgccgatattgtacacctcaccattacgccccttatggataaccagatcaattgcgctgcaatggtcctctacataaagccaatcccgaatgttcagcccgtctccatatacaggtagagcttcatcattcaacgcacgcgagatcataagtggaatgagtttctccgggaactggaatggtccgtaattgttggaacagcgtgtaatatttacaggaagaccaaaagtctcatgataagcacggaccaatagatctcctcctgccttggaggcagagtatgggctatttggctgaagaggagtctcttccgtaaacaatcctgtaggtccgagagaaccgtacacctcatcggtagatacttgaacgaacttggtgatattgtgcttcttcgcagcatccaacaatacctgagtaccattgacgttcgttcttacaaatacgtccggttccagaatactgcgatccacatgggattcagcagcaaagttaaccaccacattcacgccctgaccgatcaggcggtccatctctttggcatcagtgatatctgctttgacgaaagtatgccgcttgttgccttcaagtgatttcaaattttccagattgcccgcatacgtgagtgcatctatgttaataatctcatagtctgggtagtgttggagcatatacatgacaaagttacttccaataaatccggcaccgccggtaacgagcagtttcatagtgttgaaacctcctaattacttcacttcaaaattgaaattgatctcagcatcatgcagcaaaggatgcctttggtccttctctgataaaattggactagatgtcggccaatcaattccaagtgccgggtcactccataatatgccacggtcgttctccggggaatagtattcgtctactttgtataagacttgggtgtttggaaccaatgtgcagaaaccatgagcaaatcctttggggaccagtaactgacggtggttatgttcactcaagatgaagccttcccactgtccaaaagtgggtgatccttgacgaatatcaacgataacatcataaattgcacctgaaagaacacgaatcaacttcgtttgtgcttttggattaagctggtagtgcaaaccacgtagtacacctggctgtgcagacaaggattgattgtcttgaataaattgaaagttaagcccattttctttgataagtttgtcattataactttccataaaaaaaccacggtggtcaccgtgaactaccggttcaagtaacaaagcggcctgaaactttgcggaactcactttcatcattgaactcccttttactataattttaatttcccaaattcttcgctaaaagtaatgtcttgcgataattcatttgctttagcaagagaagcatgagttcctgcatctgtccaccaaccttgcagtgtatcaaaagtcagttgtccattttggatatatgcgttattcacatctgttatttcgagttctccacgcgcagatggttccaacgattttataatatcaaaaacctggctatcaaacatatatatgccggttactgcataattgcttttaggctgtggcggcttttcttcaatagatttaatgcgagaaccctcaatttcaggaactccaaatcgttggggatcagccactttttgaatcagtattttggctccagtaccttgaattcgaaaattttcgacataaggggtaacatcatctgaaaatacgttatctcctaaaatgaccaccatttgatcgttacctacaaagtgctcagcaagatcaagtgcttgggcaattccacctgcctcatcctgtaccttatatgtgaaagttacccccatatctcttccgctaccaagtaagtttacaacatcccccatatgctctttcccagttactataagaatatctttaatacctgctattttaagtttatagacagaatgaaaaatcataggatatttccctacagggagaagatgcttgttggtaactttagttaaaggaaacaatcgcgaacctgttccacctgccaatataatacctttcatgtaaacctccttagaaatctttcatttgattaccaaataaataattaaaaacttacaattagctaaaaactcatcccactcttatctacagcccagtgaactaggctatacagcatcagaattaaagcgtttgtaatttatctgttagtttaacaaggcatgaccttaaaagtaatacagtgctcacccagaaagttaatagcgattataatacataatgcattctataccaccactttcaatcaagcgcctctctcaattgtaagcggatcgactccccacttcttatcaattctattcaagtaaaattatcatctatttagttttagagatctccaatataatattgcatatatatgctactagctcaattgataagcttgagtagataggtaaagtaataactttttgagatatactttttgcgttaattaaatgatcgctaggtaagtcactataagagtcaaaatcagaacataatggataaaaatactttctcgtaaagatattgtaatcttttaatctatcatgcaatacatttctatctactccaaaatcttcactattaattatcacaggaaaataagcataattatattttatcccctgcttttctgaaggaaaactaataccgtctacattagccaatcgtcttctatagtgattagctatcacttttcttttttgaatctcttcatctatatatcgcaaattcaccaaacccattgctgcctggaactcattcaatttagcatttgttccaattaactcaactgtctcggggccagatataccgaagttcttataaagttctaaaaatctcatttgatcactattgttatatgctaacactccgccttcaatggaatgaaacactttggtagcatgcagactaaacatagaaatgtcaccgaaatttccaattccagttccatccacctcgactccaaacgcatgagcagagtcgtaaattaatttcaaattatatttttttgagattaattctagcgcatttaagtcacatggattcccgaaaacgtgaacaggtaaaatagctgaggttttctcagtaatcaaactttctaatgattcaatgtttatattaaagtcatcagtatttatatcacagaaaactggttttaaaccggaattggaaattgcgtgagcagttgaagcaaaggtaaaaggtgtagtaataacttctccctctaatttgaaagattttaaggcagtttctaatgccaaatggccatttaccattaatgatacgttttgaacttttagatattgttgcagattcatttggaattcattgtgcagttctccgttatttgtaagccagtgtgaattccatatacgttcaatttcatttgtatactcacctatagggggtaaaaaggactttgttacaggtataggaaattcaattttatttatcattgtgcccatcctttttcattactttcctatataagttacgaaaaaaattataggaacttgatttcccttctaaatgtttcctagctgtctctttaacgatattcgatatcctcgtttgagatgaatccagcaattcgtattcccctgtcattgtaaagtaatctctataagtaaaagaatactcattctcaagtaacatacgtgtgtgttcatcagacaacagtttgtgaaacttctcaatagccatcagcttataaatataactaacttctgaatgcatatttaagtacataaatgcttgttcacaaagatattgttcttctgtttgtatatctttgttacgcatcaggtctccaaacccctctttaaataagtctaagggaaagttatcaaagaacacattcatgattaggaaaatttcatttcttgttcttatcctattccccgaagtgtcagaacttgcattttcaccattgtccagaactcgaaaagttaccagttgttcatttaaaacatgaatattgatgaacttcaagaggtgtacccacattttgaaatcgggtaattgccttaaagaaggatcatataattcagttttttgatagatttctcttcgtattaatatacttggatgacagagacaattaaaattaaaaaagaaatatctcaaccattgagcgctacttctattctccttatcaaaaacatccgaccaaaaataatccgctttagtcaaaatttcatatttttcattcatgaacttagcatcagtgaatacagcaccgatatcaggattacattctaaaaattcaacttgcattttcaatttgtcatgactccacatatcgtcagaattaagcaaagcaaggtatctacctttcgcctgttttatggcgaaatttgttgtgtaaacagctccttgattactctcgttgataaagagtctaattctagaatctttaattttttttattacactcaacgtctggtctggggaacaatcatcaactataatcaattcaaaatctgaatacgtttgattgagaacactattaatcgcttcttctataaatttttcatgattataggaaggaataattacacttacagtaggattcatactttctaaacacctctaatttttaaaatatgacaacagttttggaggtaaaatatacttaactaagctgattataactggaggagtgatatctttaatcactctctttagtttttgtttagtactcatattcgtcggtttaagtgcgtctaatctatttacgagtctctcttggtgggctacaaagtcagaatcatatacaaaatcaaggtatttattatatatgtccatactattaatcatttcctgaatttgctcttcttcagtttttctagtccatgtccccccagaatgtaacctgtaaacagacattacctcaggaatataaccaatgagaccgaattgcgcgtttacaatattaaacatccaatcataaaccttgatttcatacaaggaaggatctatattatttataatactgttacgataaacacaagttgagaaattccctatcatgttgtcctgaataagatccgacacagtaatcaattgaaatttctcatgaactggccaaggttgaatattaaacttccgcttacttgtatctgagacaacaaaacgattgaaggccaaagcacaacccctgttttcttctagaaattcaaccattttagaaattttatatggcgaagtccagtaatcgtctccctctaaaacagcaatatattcacctttacaagccttaaaccccctcttataattttgggttatacctaaattctcctctctgggtattatagtgaaattagtgtatttatcggagtattcttcaataatttgaagagtcccatctgtggaactgtcatcagcgattacaatttcatatgaataatcatgctcctgcattataatgctgtccaatgcttctctaataaacttctcatggttgtaggttacaactaatatactaactttgacagaatacatcacgtattatacatctcctaaaattcattttcccttttttaatctgttcataattttaaagaaaaaagtatcctcatatcgatttattttctcttttaactcatgaatattgaagcccttaagatcggacgcttcttttgatttctctaatgccactttacattcatgcaaattacgacgtgtttgttctagcatagattctagattatcaatcacactatctttttgtaataggatcgattgatattctacttccatgctagttctcaatcgttcaagttcattaataaaatcgttttgcatttgtttctgaacttgtaaattcatatttgcatttttatttattattatgaagcttcttaaatcgtctaatatttctaattcgaaaataatttcttcaacacctacaagttcatcagtaataattaactgaggatcggtagtttcaaatatatatagattgtctaattcgtagctagcattcgattgaattgaggttatcttcttctcgccattaaatccactattcaatatgatagattttacatttatcatgcaacctgtcatcatgggatcaagtctgattgatttaattagttcaaattcatgcaaatgaaatattagtttaatgatctgaggtaccttttctattacatattcggtattaatggattgatcttcgtgaaaaccatctccagtatctagaaacaattgagcaatttctgatcttggtcgagaagttgaattaccctgctttaaagacataaacaaccggtaaaagttttcctccatgtcaagaaagctatctcttttttcatcggtaatcttattctcattttcactgaggagaatttcttttcctttaggtatcataacgaatgatctaactgcgcattccgtataatctagttcgcacaaataattattgtaaaaggaatttacattattccaataatcactaactctggggtcaatcccagtaataaactccatcatcattaatttttcccataattcaacatccccatgagataccacagaaggtttatacttactaatttgatcgattacattcaaagtttcattaagtgaaggcaagccatttatgctatgctctttctgccaaatgatgtctttgttaaataatgttttataaaaagaagaaattctattctctgccatataattagcactgttcttaaaaggagctgaaatcaatacaaagcatttactaactctataaacctcctttaagaaagcttctcttttaataggtggtatgtgctcaagcacatctagtgcaatcacgatatcaaatgaattctcctcaaactcaagttgagtagcatctgcttttataaaaaagggatcacttagcaattcatctggaacaactatatcagagtataatattacatcatcaggaaaaaattcttttaaatttttgtggctattcgatccgacttccaaaatattcatactatcgctagatctaattttgttaataatattttgggcaattttgtacctttggtattgatgaaaaggtatcatttcattctccacctccagcacgcttaattctgagtgtattttcaacatatactttattccataatttcgattccatattttctgcaatattgaatacatatgcattctctgcataatcgacaaataatgctgctctattatgaacagttggggttgaaatcaccgtagaaatattgtaagtcccctctactaaagggagctttgtataaaactcaacaatcattttgtcaccctgagaaccagatatttcaccaatattttcaaaaagagaattacttcccagtatctctatgtttttattgtccctaatatgataccctacaactacactgcaattattattgtatttaataaacattctaattaatactttttcattaaattgtgcagtttctaccaattcaccttccgcattaataacttctatttcagtaagttcagcatccatagttccttgtcgaaaagatgataccctcttatgaaattctttgttttcaacaaattctcgtgtagtaacatccatctccgaaatttcattaacaggggatatactgatttgaccgctctccctcgatagtgtaatcatttcctctctcgttgctttagagtacatgtcaactacctcttcagaaggaccataacatacaaaatttcctttgtttagataaagcgtcttgtggcataaagacttaattgaatttgtatcatgagtaacaaaaataacggttactcccttgctgaacatctccttcatcttagacatacacttggcctgaaaatacatgtcgcctacactcagagtttcgtctattattaagatttcgggatctacgtttatggcaacagcaaatgccaaccgagcaaacataccactactataagttttgacaggctgattaataaattcaccaatatcagcaaactcgattatatcagcaactttatcttccatttcctctctagtaaagcccatgaccattccgttaaagtatatattctccaatcccgtaaattcagggttgaagcctgctcccagttccaataaagctgatatctttccttctacagtcacttttccattagttggattaagaaccccagtaattaatttgagtagggtcgattttcctgaaccattttttccaattattcctattatttcacctttctttatttcaaaggatatattgttcaacgcatagtgatcagaatgatatttttttttcaagggattaagtgcttcttttaaacgatcgataggcttcgaatacaatttatagattttcgtgagattctccactttgatcaatgtttgactcattctaatatctccttaattaaagcacatcagagaaatgtggttttaactttttgaatacaaaaacgcctactaataaaacaaccaaggtaatcaaccagaaatatatggtttgattgtatcgatgaaagaaccaaacatggttaatgaacgtatctctataaccttccacaatataataaatgggatttaatttaaacaactccgctgtgcgttctgatagcatagtggtcggccaagcaatcggcgttaaccacatcccaaattgcagcaaaatagcaacaaactgacctgtatctctaaaaaacggtataatagaggcagtaatccaagaaaggcctgtcaaaagtaccaccagacaaaatgtataataaaaaaactgaacgtaataaatgctaggctcaaatccataaaaccataaaatcactatcactattcctatgaagaacagatgaataaagatagatgagagtattttaactattggaagcacactcactttgaatacgacctttttaacgaggtaactgtattcaaacatactatttgtagcaccactccaagcttcagcgaaaaacatccacggcacaataccaactataaaccatataataaaaggtataccttccataggtgatgtagctcgaaggcctttttcaaagacaaaccaatacacagctatcgttgtaattggggtcacgagcgcccaaaacactccaaaaaaagatcccacatatcgagttgtaaaatctttctttgctaaattaaatattagaccccgcaatttcattgactcggtaataaatctcataatactttgcatgatcaagagtccacctaacataagtaatcataattattatcttttgaatgatagaagtgcttctacagcatctaaatcgaatgtaggaataccagcattaatgtgaacctcatttctttctgcaaaagagtcatcaataagaatagaatttacatgagtaatggattgtgatttaggttcattgactttcaggtgaataacatcgtcaaacaaaccatttaatctatatttctccagagtctgatgaatatcacctttatgcctggttattagatgtatctttttcccatgattaatactttgatatataaaggcaaccaaaaagtgattcaccttttctttgaaaactagagtatcatcgaaatctatatatacattttcatatgaaatatctagtttaaatttgctttgtaaagcacgatccatttctaattggtaactatttttattcacttcaatctcataacccatcaaatcaaatacgctaagcaaaggaagattcacacccatattcctatagaaacccattgttccagaaactcgagcagatatctctaataatgaaagttcacctgctttatttcgttttagttgaaaaaaccacatgcctttaaacttcatagtagtattaattacattcgctataatagtaaactcttcatttcctactgcgatggagtttacactgatcccgtttgaaactctagccctttgacgtgctcctacaaacttgagagtaccactgctatcagtaaagcagtcaatggtatactcgtctccaggcaaatattctaatatcattacagtcggatccttctttagataaaactctacatcttccttattttttgctagatacgttccttttgatccctgcccaatatcaggtttgagaaagactggatactcaataatttcattaccagaagcatatacatacggaacgttaactttattcatcaagtgctcgtatgtcttccttttggatcttgttatctcacaggtccgataaggcgacccaattacttcgcatgcaacttcttcatgatgtgtagctaactccaggacaacactatcatgggcaggtattacataatcgatatcgtaagaattaataattacgttaagtttctctatgaaatcgttatcactcacatcaggtacatcttcgatataattttcgaaaacaaatttcccatgattggaagctacacttgaagcaccatacagagtaatgaactttgaaaaactcagtgacctatgaatctctaagcctatctccgaaccgcaaggaaaaacgagtatattgacatttctcacttaaacatcacaatcctttttcattctatttttttacttgtcctcatcccaaaaaagtagaactcgactcattggtatcatctctattaacttaaatcatatcctatgtttatttttcatatttgtcgaatataaaaaatctatgtttttattttttagtgagttaataggtttttaaattagtctccatgaaagagttgaaattattacagaaatcaaagtagatacgataaaaattatcattggcgtcatattgcaaagatggtttaaagatcaattgaatactcgaacgatataaacgcgattaattaaaataaaaccccgtattcattttcatctgaacgaaaaccatatgcaggacatccactttcgacagagagtaggagtattggatatgattctgaagtaagtccccctatatatacatgaagaaagcgttatgactcacgccacaattatgcgcgttcattagcactaattaggcatagaaagaggcaaaagtattggctgatcaaggagatgatcagagtacaattcgagagcctacttctctttataagtatattatgttgcttagttagatcaaaactgttcgaaacaaacgtactatgctaaaatattgtcgtatctacaagaaaaaggagagttacaccttgtcgaatccagtatacgggaaacaaaagaagacgtcgagcaaagcaggtaccagtctaaactcgccattactctggacccttaccatagggttcatcttatttttactctggtcctctttccaagttgcgttatttaacgggcaattgcttcaattcgaaggacccatttattgggcactcgtgattacaaccctcctgttcatcgtctgggctgtagcttattacaaaagtctcgctctagattcccaacgcaattggctaaaattagtcgtcatccttctaccgcttacctacatgctgtcactcattagtgcagcatctaactatttggcggttaacacaattctgattcaatgcatttacgccatgttattcgtcatgacgatgtacctacttcagaacaaacaaatcaatcatatcatacaatcttccttaataggaattgcatatataattgttggatatggtctattgaattggtttggggcattcagcttcgcgggcaagttagtcggttggttctcttcaggtgtagttaacggagtatacaaccaagcgatctggaatgatgccaatggtcctcggcttgcttccgtattccagtacccgaatacatacgcagcgttcttaatggcatttctgtttattactatttttagcctgattcgcaccaaaaaggtgtacatgcagttagtccatagctttatgcttgttcctatcttgctgtccctgttgcttacactttcgcggacaggtcttgtgatgatgccaattgtgttcgtgattatcctgttgttgcttaaaccagcaaaacagattttatggttcatttatcttgtcatttcaggaataggaacaattgcgatcttaaatccagtcaatactgctggactagaactgcagcaacagttcactgctggagttgcagccaaaggttggatctatctggttgcagcatccatcgttgtcgcaatcatcatctgggctattcaacgttggatcgctcccaagctggaaacaaagctccatacctggggtaaacgtaaaggttcaagcctgtggatcccgctcggctcagcgctgctcgccattatcgcagcagtgttgctgttgggtaccagcgttcgcaacattttgcctaatagtatcagtacgcgtctggaaaacatcaacttccagcagcacagtgttcttgaacgaatcaccttctataaagatgccgcaaaggtcattgcagattacccattgattggtgcaggtggtggggcttggactgcgctgtacgagaagtatcagaacaatccatatgttagtgcgcaggcacataacttcttcatgcagtacctggtggaagtcggaattatcggatttatcattttcatggcatttattctgtatatcttctatcaatacgttcgcagctacttgcgaagagacgaaagcgaaagagagtcacattttgtatttttcattttgtccatgactattctggtattgagtctcctcgatttcaatatgagttatgtcttcatcggcatgctggtgtttatcgggtttggcggtatggcagcagcgatcgaaccacgaccgtttcagcgcttcaaagtaagcccttctacatcacgaggaatctatattacgattgcaggactctctataatactactcttgattgtatcagtacgctttttgcaagcaaatcaatatgcgaaactagccaaggaggtcgctcaaagtagccaggatttccaagagataaaagcaccattagaaaaagatctatcgattcgcacaacacatattgattcattgctgacactctcttccttgtatcaacagggatatgaccaaaccaaggacgatcagttttataacacttctcttgaattacttcaaagaggtaacgcagccgaaccatataataagagcatagtaacccaaatgatacatctatatgatcttagggcagattatgttgcagcctatgctctccaaaaagagtacgccgctaactacgtctggaatatggaatggtatgagcagttaatcacccgttcgttcgatctagggtatcaagcacttggacaaggcgatacagctaagaaggaatcttatttcacttcaggtctggaagcctatcagcatgttgttgatggagtagaacatctaaagactcttcctgaaggacagcttcaaggacagcctttcgagctcactccaaaaatgattctgaatgcaggaaaaatgaaatatatgttaaacgattccgccggtgctgctaccattcttaaggcaggagtagcagaagatttgaccgatgctaccaaccgtgaaattgctcgttggtaccttgcctctctaacgaaggatgggcaacaagatcaagctatatatgataagcttatcgctctcgcacctaacgaagcagacgagattaaacagatagcagaactgaacttctaataacaaaatgcactagtggtactcaataattccacacaaaaaaggtttgccttcattaaagggcaaacctctttttgtgatcttattcattataaatatattagttcgacgccactatcttcttcaagtacgccaacaaatcctcccgcagatccgggcgctgcaacgcataatgtatcgacgtttcaataaagcccaacttctcaccaacatcatgacgcagtccgtcaaaatgatatgcgataatctgccgctgttcattcaaacgtgacaaggcatccgtgagctgaatttcgcccccaacaccagcagattgttgacccagtatctcaaagatatccggagtaagaatataacgtcccataatagccagatttgaaggggagtcttccgtctttggtttctcaattaggcggcgcgcgcgaaagacacgttcatcggtaggagtcagcaattctccgtctacaatcccgtagcgggatacctcgctccattcaacaggttgtacaccaacaatcggagattgcagttcatcgtagacatcaatcatctgctttaggcagggatggtcggcttccacaatgtcatcccctaacaggacggcaaaaggctcgttgccaataaacttgcgggcacaccagatggcgtgaccaagtcccttcggttccttttgacggatataatggatatctgccatctcggagggtttgcgtacttcgttaagcaagtcccacttctgtttgtccgccagattctgctccagctcaaacgaataatcgaagtgatcttcaatggcccgcttccctttacctgtcacaataatgatatcttcaatacctgaagcaacggcttcttcaataatgtactggatcgttggcttatccacgatgggcagcatttccttgggcatcgccttggtggcaggcagaaaccgggtacccagccctgcggctggaataatcgctttgcgaatacgcacacgaacccactccttttgctagaaacatattttcatatatttaatgattcttattgctacgatgcttggacttcattataccatcaacaattcgcggatatcctgttcggataaggtcgtcgatcccccgtctcccggctcgatcacttcggcaatcaagtccttcttccgctgctggagttccagaatcttctcttcgatcgtaccttcggtaaccaagcggatgacttgcaccacttgtttctgtcccatgcgatgggcacggccaatcgcctgttcctctactgcgggattccaccacagatcatataatataacggtatctgcccccgttaagtttagtccggttcctccagctttcagagagattaagaacagttcggcttcaccctcgttaaatctgtgacacatctcaacacggctctgtgcaggggtctgaccatcaaggtaaaacaggtttcttccctgtgccgcgagcgtctgacgaatcaggttcaacatgcttgcaaactgggagaagatgagaatgcgtttgcctgaagctaaacaatcctcgaccgtttcaagcaactgttccattttcccggaatcgccttgatatccttccacaaagagggccggatgacaacacaactgacgcaaacgggtgatgcctgccagaattttgatgcgattcttctggaatccgttatcctccatgtccttcgatgcttcatcctgaagctgggagaggtatgccgcgtacagtttcttctgttcaaccgtaagctctgaccgctgtaccgtttcaattcgatcaggcaattcttccaacacatccttcttcaggcggcgcagaataaacggacgcaccatccgcgagatccgttccggaggaaggtcgcggaatcttctgtaacttggaaataatcctgggaataccgcttcaaaaatggaccacaattcatccagtgagttctctacaggcgttcctgtgagtgcaaaacgacgcggggcttgaatttgtttgactgcctgcgcggtctgagaagaagcatttttaattgcctgagcttcatccagaatgagcgtatgaaaggttcggcccaggtaggtatccaaatcccgtctcaacagaggatacgacgtcacaatcacatctgcctcatccatgcctgaaagcatattggctcgctcttctttctgaccggctgcgatcaggactttcagatgcggggcaaaccgtgcaaactcattagcccagttataggttagcgaggcaggcgccacgacaagtaccggagggtgaatgaccctcgttcggatcgtcagtccatcctgctgcatcgtggaccataagccatctgtattcactgaagccatcttgtccaatgggagcccagtttcgggatcgatgtcggtagtcgccaacgtttcaccaccccgtaatgatccgctctcccggtatttatcaccgctcgtatgctcaatgttgtactcaggcttctcctgaagaaccgctgtgatataggcgatactttgcaacgttttgccaagtcccatatcatccgccagaatgccgccaaaacgataataagcgagggtacgcagccactggtatccactgttctgataatcccgcaggatgggggtcagtgatcccggcaatgtaaaatccatccgttcgggatctctgagatcatcgaggaaacgtttcagagagcctccccacttcacatgaccggaaacttcgtccctgcctggcaattgtaacgcccgaacagctggcagccggatatggctgctcttgatgtcatctgctcccagcccaagtgaatcggccatgtgagcgaagctatctgcaccttcattttcaagtgaaagaaagacaccgctcttgagacggaaatacggtttcttttccacaatgcgacgcatgagttcctgaagctcctgctcgtccacaccttccatctcaaatgaaatctccagccagtccaatcctcttcccaaatctgcccgtactttcggcggtgttggataggattgcaccatcgccttcacggcgtttggcatatagatatctacctgtttctcaagctcaggcaacagatgatacattacatcatatattgcatcttcccgttcgctcgcccaaacactaccatccctttcgagaaaggatcgatcaagccgttcaatcagattccgctctttgtatcgatcacgcaccaaaataacctttttctcttcttcatctattaaatactctgcaagcggattaataaccatgacctcatagtcgaattccagacgtgctgtaatacgctcacgatagaagtcgatgtacaacttgggtgagagttccggttccgcgatctgttcacgcacctgcgaatcaatggacagatgtccaagcgtacgcagttctggcacgacatgctgtacgaattcatccacctgctgagtcgaaatatcgatgctttccttgattccatacgacgtgagcgccccactcaagtcctccagacttcgcatctgcatcggctccaacatatgcaactgtccttccaccacagcggcatcataagcagggagaagaatcagctcacgcagtccagaaatttcaagctgatatccttcattcgctccctgggcgatccggtaaaataaaggaagtaccccctcacccagtgtgagtggtccattggcaaatcccgtgccctccatccggctgtcagcctgtagcaacaattccagcaatggcttccatacgagaggagcaatcaatatatcccgtccgtccgaagctcccagataaccggagatggattggcgataggcctcctcactctgtctcattcgaataagcatcgagagaatggcctgatcctgcggagtgaaaacatgcattaatggatcatagtgaaacagcttggtaaatgacatgggctcgcccttctcgatacagttcaggaattgcttcactttctgcaccacatacagacgtttgttacccactttcaattcaagagcaagtttcccaccacccttgtgaacctgtatcagcttacatataaactgaacctgcaattcttcccgcagggaggaacggctgacaggggcagtgtatttacgatcatttccatgcagcggtctccgatccttggcaaacatggacagaatctgatccgccgtacggtaagaaggtttatctgccgagcggccccaccccgaagctgagcttggccgacctgcttgggcaaagtgaacgggcggacgctctggggcatcattcagttgctctcgttgtgaagcggactgcggtcgctcccacatgctctcttcgaccaacgtcccaaccctggacttggaacctgaactggaactggtattggctccttggcctagagcaggttgaggaggcttccccgaagcaatcgtggcattacgctcctgctgctcaccccattcgtgaatagccaacaggacagcagcgacatgtttgcaatagtcataatgcctaccgtcacccggacaactgcagcctgccacaatctcacctgatccatctacatccaccgtaacctgataacgctccgatccacgtacctgagcttcataatgaagctgatcctcaccgaccaccagattggtcaccctgccagattggttataatcttctccgcgcttgaatgccgtgaccccgcacagcaatttgatatccataattgtgaatggcgccacgcttcttcgcctcctgtatcatgatgtaaaaaaaccccaagagctccttgaagcagagattggggttccttcatgcttgtaactgtagttgtaccatacaaacgttattttaccaattgaccacgtgtaacgcccagttggtttgttgctttgagtgttttccacacttgtgtaccactgatctcgccgcgcagtgcacggttatacagatcgataacttcgcgtacctgctccggtgtctcttccaggaattccacacggtaacgggatacacccagatccataaagttggtcagatactcggcacctgactgctccactgcgttgtataccgtattacggcaaccttcatccacacgtaccgggtgagacatgccgatccggtcttgcagggatgcacgctgttcctcacaaggacggccacagttcgtgaagtccgttccttcactcataaacgtacagtacacacagtgctcggtgtggaacatcggcagatgctgatggataaccacttcggtctgacttgtacgggagtgacccagcaaatcaaccatttgttgaatgttcaggtcataggatggggtaatccagtcacatccggcttccaggaacaattctactgctttgtgattggcgatgttcaatgagaagtcgccgatcaattccgggtgcttcgcatccgggttttccatccggtgacgcaggtagaagtacagtgcgcctgtattacgtaccaataccgcatccggcttcagacgcaagatgttgttgtgatatccgttctccccaggcatgtgaatacgcggtgttgccagcgcgatcttgcgaccagcggcatgcacagcttccacggctgccgggaactgtttgataaactcgaagtcggcatagatcataccgattcctgcttcaatcgctgcctccacttgtggcaggctacggcagagtgcggtcagttctgcttgaccgcgagcgactggcgatgccggtttaactgaatcgccgtacacatctaccgcccgtttcacgtagacaggcggtttaggacgttcacccgcgagttgttctaccgcctgacggcgaatattattcaactcgcgcattgggatgatgacgtcaccgtgcaggttgacgtccattccttccaactggaacacggtgcctcccagacgtccgaactgctcttcgagcaattcatgtgtcattggacgcttctgggcgatgtccagttccatctcggaatcaatacggacggtcgtgcctttctgcacgtctgtccaccatgtgctaagcggctgccccgggctgccgatgaccttcaccttcactgggaatacacggtacggcttctcggtctcgaagctttgacgtagacgtttgtccagcgccgggtcatttgttttccacactttgtcgccaactttcacgcggcgcagatctacgtcactacggcctggcacaacgtcaacgatccagccctcttcggcttcgccttcgagttttacacctttgcgacgcacatcgtatacccgtccgccttcttccttctgagtcgggtctccggcgtcaaatacaattccgtctccacgtttcacaggtgcatccagtttcaggaccacaccatcgcgcaacacttgatctacacgaccgaggtagacaccacggcttttcgggaacgttccatccaccagttctttgttgtttgtaccgctcaggaaaccatgtgtgaatccacgggagaagctttgctgcaattcgcgaacttcttccttgcttggtggtgtgttatctccatcaaaataacggtcaatcgctttacgatatttgcttactacgtttgctacgtattccggcgttttgagacgtccttcaattttgaaagatgtcacacctgcttcgatcagttccggcatcaaatcaatcgccgccagatccttcggagacaacagataggctacatcacccatcggtttgtgcaccccatccaccatcaggtcgtatggaagacgacaagcttgtgcgcactccccacggttggccgaacgtcctccccacatttcggaagtcagacactgccccgagtaagatacacacagcgcaccatggacaaatacttccattggaagcttcgcctgctcaccgatcttctggatctgcttcaggttattctcccgtcccagaacgacacgttccatatcaaacggcttcgtaaactcgaccgcttccggagacgtaattgtcatctgtgttgaaccgtgaatcgggaaatccggcgagatctcgcggatcatcttcaccaaccccaaatcctgaacaattacagcgtccacacctgcatcgacacaagcgtcaatcagttctttggcatccgtcaattcattttcaaaaatcaatatattaaaggtcaaaaaaccttttacgccataactgtgcaaaaacgccattatctccggcagctcgtccatacggaaattgttcgcccgtgcccgtgcattaaacttttcgactccgaagaaaattgcatctgcgccattagctaccgccgaacgcatacaatcccagtcaccagccggtgccagaagttcaacgtcttctcttcgtattgttgctgttttcatgtagatcctccccataaccggctatccgccggatttcatccctatatctctaaacgtctgaacatactaagcctaagactgcaccttatcgggtacacctgcattgtcacggtattacaatatctatctattatgtctgtattgcctgaactccaagcttacagtcattcctattcatcagatcagcagtcataactcctgaactagtatagtgtaccacttctgcaccgactcttctacgttttcctgaaaaaaccgtttaccattttcatttccagtacaacgaaaaaaaccgaaaggtcttttgaccctccggctccactacatttatttaataaaagtaaatgagttcactgctttttccaaggctgccgcctgaacttctgtcttgttggcatcattcaggccacttgtgatcgtataggttgttccgtccttttcaaacacgatctgacgacccgcatatggcacgcctttgtccagctcatgatacgtaaaggaaaatgcaggcacacccgcaaacgtcagttcctcactgcgaagcaatttgaagtttttccgcgttttggtggcttcggcataagcttctctcaattggctgaccgtcatctcgattgacttgtcttcgctcgccgcaatggagaattctccgccggtaaaggtgtacaccacaggtgaatattcgaatcgatcactgtatggtgtccagtaacgcggaatatctacactgtaatgataacgtttggacgtacgtgtaagtgtcttcgttttgtctgtcaaataaggatcttcatccagctgaccgaaattatcggcaaccgtatcaaaatcaatctccacactcttcataatccgttcaaaccatgcccgatctgcactttgctcctcagggaacgtatactctgcataataccgatacccattcttctgcaaaagaacatcgaactcggtctgccagcccccgccaaagttataacggaattcattcacctcggcagtttctcccgagatatccatcgtatatgaaccaattggctcgtaactctctggtgtaaatgtctcgcgcatccacttatccagttggccgctccagtcttttaccgttgtacctgccttcgccgaagtgacacgccattgcagatacgcaccatccttggcttcatagatcatctgattgttatccatcgaccagccggcaggaatctttaactcaataccataatcatcgttccacgcggagcgcatgccattatctacggtggatagatccttgatcgttcgatccgattccgcataggttggctggaatgaattgagtagcgctgcacgtttgcccagatctttataattcagggcttcgtaatccgctaggtacacatcatattgacggccttcgctcagatactgacgcatctcccataacatgccgtctacatctttcacgataatccgtgcataaggcgttttgcctttcgacaccgcttcacggtccagcaccgtatctcccgattgcttggcctcctggacaagttgctgcaacaaatcatccgcatccagagccacatcctggtcgctgacatacacttcaagataataactgttgtccgcagcgccgaaagtcatcatgcgctcctgctcaccggtctggaaaactataagatctgccgggtagttaatggaccaaccgtaaaaactgttgccaattctggttttgccttcatccggatgaataccatcctcatcatccaccgaatcatcggtttgcaacagacgaataaccatttctccggaactggttggagctagcgtcgctccgataccggcagcaaccggacgaagtggaaccataagtacgccattcaccatcttgggagcggcacccatctcatgttttacaccatccacccaggcaattgaactgccaatcgttagggtgaccgtgtgcggaccttccttgattttgacgacatcatttttctccagccggatttcactgccaaatgctttcttgaacacaccaacaggcaccatcgtaacacccttgaacttgtaaggtttggctatggcctgcttatcgccgttaatgtaggcgctcgtgctacccgctttgacccgtagttcacttgtcgtcagatcagatgcccatacaggcaatgccgctccaatggtcagcatcccggttaatacacctgtgcttagcacacgtatccatgactttttcattccgttctttcgtcctctctccatccgggctgatcgccgggctttattgttcttcatctgcaaggaacgcttcatcttcctcgtctacgatgtctgcgcgatcagcaagcaccaacgtgcgggtgacgatatcgccatccgattgcatcaacagctttaccttttgtccaggcagatactttttgagcaactcattgatatccactactgaagagacacgtgtgcccgcgacactgtataggacatcgccctctttgattttggctttcttggcttctggagacagtacgcccgtaatcgttaagggatcatctgtaggcaggcccacaatcgcagaccaactttcctccagctgtagccccagacttgcacgttttatttttccatatttaaaaaactgatcgatgatatattgaacggtatccacgggaatcgaaaaccccaaactctctacgccgaccgcagaaaatttcatggaattgataccaaccacttcacccttcaggttgaccagcggtcctccgctatttcccgggttaatggccgtgtcggtctgaatcaaccggtaggtcgcctcaacaccacgattcaagccgctaattactcctaccgttgccgagttgcgcaaagaaaaggaaatcggcgtacccaaggcaatcaccgtttctccaacagtggtttgtgaagctttggcaaagctcgccggtttgagtgatttggcattgattttgattagagccagatcacttagtgcatcactgtatgttttcgtaattttgtatgtattgccatccgtcgttacgacaaccggattcgttaatccgtcgaccacgtgagcattcgttacaatccatccattggaccggataatgacacctgtaccatgtgcaagattataacggtcgtctgatgttgcaccgtcctgcacttcggtagatttcccaataatacctacgaccgaaggagacaccttttcgatcacttggggaatggcttcacttcccttgtacgtgtacgttccggatttggcatcatattgtccacttccaccaactgccttgagcagatccttggtgttcacatagacttgaccgtctaccactttcgcttgcatcgccgctttggattcagctgcaccggccgttgccgctacactaatcgagagtacagcagccatcagaatggctatcccctttttacccaacacgctcatattctcacctgaccctctctatacatccttcttgcgcgactcgacatcggattcatcgctgaatctattctctctttctctcatctgcaattccggtatccttcaatgtatcatacagaatctggatatacaattgttttaagtcctattttagtagagaagatagaatcctgttcaatcgctccatataaacgaaaaaaacaccctccatgtctcccatggaaagtgttcctccatatctcttttggcttaaattccattcacttcagcagcattcctactgagcaaaccaacccgttatcatcgcatagtctgtcatcagaaataccagtaggctgactactgcaaatccgatcgcaaacagatttttcttcggtgcccgaagaagccgaacaactccgatgaaaatcaggatcgtaaataagatgacaaaaatatcaaatgcattaaaattcgatgtactcgccgtggcagcttctgcaaacagcatggatagacagacctccttaccatagttgaacagctaacgcataccctaatatcttcctctatgttatctgtaccctgcttgtaatgcaagccctatcatccataaaaatgaaaaaaagccaatttggccgaatattcctgcaatgctcgtcataatgcatatgtaaacactttcacggaataaccttagtccaaaggaaacactgtgcataattcataatgaaaagcccttcttctcggaagcagagcacatcagatcgtaatccaacgtctctatcttttcgaaaagaagggccaatactgccacttcatattgatataactaatggttagagaaccttagtccaccaattgcagtgccttgctgcgctcggtatcccgctccagaaccggcttcaagtacttgcctgtataggaagcttccactttgatgatatcctcaggtgttccagttgcaacaatggttcctccaccgctaccgccttctggacccagatcaacaacatagtctgccgttttgatcacatccaggttatgctcaatcaccaacaccgattccccggaatcaaccagacggtgcaatacgttcagcaaacggtcgatatcatcgacatgcaaaccggtagtcggctcatcgaggatgtagatggttttccctgtactgcggcgatacagctcggaagcaagcttcacacgctgggcttcaccaccagacaatgtggttgcaggttgtcccaggttgatataacccaatcccacatccatcagcgtctgcattttgcgatggatcttcggaatgttctcgaagaattgggttgcatcttcaaccgtcatttccagcacatcggaaatatttctgtttttatatttcacttcaagtgtttcccggttgtatcgtttgcctttgcagacttcacaagggacataaacgtccggcaagaagtgcatctcgattttgataataccgtctccacggcaggcttcacaacgtccacctttgatattaaagctgaatcggcctttcttgtatccacgtactttggcttcgttcgtctgagcaaacagatcccgaatatcatcaaagacacctgtgtacgtagccgggttggaacgtggtgtccgcccgattggcgactggtcaatatcgatgactttatcgatatgttccagaccacgaatctctttatgttgacccgggcgcacccgagcacggttcagatcacgtgccagcgttttgtagaggatctcattgatcaatgtggatttacctgagccagacacacccgttaccgcagtaaatacacctacaggaatcttcacattcagattcttcaggttattttctttggctccgcgtacttccagccagcggtctcctacacttctacgttctgcacgaatcggaatgaatttgcgaccactcagatattgaccggttaatgagttctcatcgttcatgatctcctccggtgtaccctgtgacataatggtacctccgtggatacctgcacccgggccaatatcaataatatagtcggcagccatcatcgtgtcctcatcatgttcaaccacgatcaatgtgttaccaatatcccgcatatgcgcaagggttgaaatcaggcggtcattatcccgttgatgtagaccgatacttggctcatccagaatatacagcacacccatcaggctggaaccaatctgtgtagccagtctgatccgctgggcttccccaccggacaatgttccggcagcacgactcagtgtaagataatccagaccaacattcaccaagaagccgagacgactgttgatttctttcagaataagcttggcaatcgtctgctctttctcactcaattccaatgaatcgaagaatcggccagcttcaccaatggacaaactagtcacatacgccatgttgtgatcattaatcgtaactgcgagactttcccgtttcagacgctgacctttacatgtaccacaaggcttcgcactcatgtaaccctcaataaactcacggataccttcagatgctgtatcccggtaacgacgctccaggttattcacgataccttcgaaggtaaccagtgcttccttccgttgtccaaaatcattctcatagcggaaacggattttctccgtacctgtaccctgtaacaacttgttcatctgctcagctggcagatcttcgacaggtacattttgcggaatgttgaagtgctcacataccgacttcaggaactgcggataataggtggatgtgccacctgtccaagcatcaaaagctccatcttcgatggtcttagtccgatccggtaccagcagatcagggtcaacgatcattttgacgcctaacccatcacaatccgggcaagccccgaaagggctattaaatgagaacatccgcggtgccagctcttcaatactgaatccgcacaccgggcaggcaaagttggaactgaagcgcagctcttcttcgcccataatgtccaccaggagttgtccaccggacaaattaagtgccgtttcaatggagtccgccagacgcgcctgtacatcatccttaacaacgatccggtcaacaaccacttcaatcgtatgctttttatttttctccaattgaatatcttctgacaggtcacgcagttccccgtttacccgtacacggacaaagccctgcttggacacatcagcaaatacacttttatgctcgcccttgcggcccgagataatgggtgccaaaatctgcaaccgggtacgctctggatattgcataatgcggtcaaccatttgttctacggtctgggaactaatctccacgccatggtcaggacaatgtggatggcccacacgtgcaaataacaggcgcaggtaatcataaatttcggtgacggttcctactgtggaacgtgggttacggcttgttgttttctgatctattgaaatggcaggagataatccttcgatggaatcaacgtccggtttctccatctgtcccagaaactgccgtgcgtaagctgacaatgattcgacataccgccgctgtccttcggcatagattgtgtcaaaagccagcgaggacttgcctgagccactcaggccggtcaatacaacaaagcggtcacgcgggatggtaatgtcgatatttttcaggttatgcgctcgtgcgcctttaatgacaatgttatcgctcgccaatagtattcatcctctcagtgtgttaatccaaacctttaaaggcttttcaatccctcccaaaccctcccttccaagggagggccccagagggcgcagccctctggacacccgaaacaagcggtgcaacggtgaggggtcgggtcttgctatgtgaagggttgtcgtgtgcccgcggctccacataaggttccggctcattgccggaaccttatgtggccgctctactgcgaggtgacgctctcggcttcgccttggtcgcgtcaggtcgccattgccttcggctcggctccaaggtcaataccaggtcgctctcagcttcgccttggtcgcgtcaggtcgccattgccttcggctcggctccaaggtcaataccaggtcgctctcagcttcgccttggtcgcggcaggtcgccattgcctttggctcggctccgaggtcaacactggagcactctcgactcccaattgctttcctataaaccttttaaccaatttcaacatttctatcagtatagacctgaattcaagatttcaacatctcttattatcggtagatatcatcaatttccttactcaacaagagaacggccaattggccgttctcttgttacagatccatctttaccggagcatatgaatgagctgtatcttattcagcgcgaagttccagcaacgcatcgcgaagctcggcagcacgctcaaactgcaggtttttggctgcatctttcatctctacctctaggcgctgaataagcgcctggcgatctttcttcgacatcttctcggctgcgcctgtaagatagtctttcttggattcggcaactttggttgcctcaatcacatcacgcacttttttgcgaatcgtctgtggtgtaattccatgtttctcgttgtactcgatctgaattgcgcggcgacgctctgtttcctttatcgctttatccatcgaatccgttactttgtcaccgtatagaataacgcgaccctcgctgttccgtgccgcacgaccaatcgtttggatcagtgagcgttcggaacgcaggaatccttccttatcggcatccaatatagcgacgagggaaacttcgggcagatcgagaccttcccggagcaagttgattccgattaggacatggaaaacgcccaatcttaaatcacgtaaaattgccatccgttccaacgtcttgatctcggagtgcagataacgaactttgattccaacttccttcagataatccgtcaggtcctcggacatcttcttcgttaatgttgtaatcaacacacgctcgtctttggtaatccggtcgttaatctcaccaatcaagtcatcgatctgcccctttgttggacgcagttcaatgattggatcaagcagtccggttggacggataatctgttgcaccatcgtatcggtatgctcgatctcatacgggcctggtgtggccgatacatagatgatctgatccatcttgccttcgaactcatcgaatttgagtggacgattatccagcgctgacggcagacggaagccatgctcaaccaatactgtcttccgcgcttggtcaccattgtacatcgcacggatctgtggcaaagtcacgtgagactcatcgaccacgatcaacatgtcatccgggaagtaatccatcagtgtgtatggggtatcgccacgttcgcggaaagtcagtggaccggaatagttctcaatccccgaacagaatccaacttccttcatcatctcgatatcgtaccgtgtgcgttgctccagtcgctgagcctccagcagtttcccctgttcacgcaacacttcaagacgctcctccagttcacgctcaatgttcaccagcgcaaccttcattgtctcttcttgcgttacgaagtgagacgccgggaagatggcaatatgttcacgttcaccaatcagttctccggttaacacatcaatctccgtaattttctcgatctcatcaccgaacaattcaacccgaattgcatgttcacccttggaggcagggaaaatctcaacaacatccccacgaacacggaacgtcccccgcacaaagttaatatcatttcgctgatactggatctctaccagacgggacaaaatctgattgcgcggtttctccatgcctacccgaagtgacagcaacatgcttgaatacgagtgcggtgaacccaaaccataaatgcaggaaacactcgctacaatgatgacgtccctgcgctcaaacaacgaacttgtcgctgcgtgccgcagtttgtcgatctcttcattaatacttgaatccttctcgatatacgtatcggaggacgggatatatgcttctggctgaaaataatcgtaataactgacgaaatactcaaccatgttattaggaaaaaaatctttgaactcacttgcaagctgcgctgccaacgttttattgtgtgcaataatcagcgtcggacgttgcagttgggctatcgtctgggctatcgtaaatgtcttacccgtacccgttgcacccagcagcgtctggtatctcttcccctcctgaacacccttcaccaattctataatggctgcaggctgatcaccttggggagaaaactctgactcgatttcgaacgttttgtcgctcattataatatcgctcattgccgtatctcaccctatcgtctaaaataatagtcactatatattgtcgaagttccccgaattttcatatgggaaaacttatagtaataggaatatttgttcccgtttaattatacctcgttcgttttagtgatgcaaacgtgaaatgaagataggagtgggttaatttatggatattgcgacacttatcggtattattgccggaattgccgcagtcattagcggttttttgtgggaaggcggccaattgtctggtctcctgcaaaaaacggctgctttaattgtattcggtggaacgattgctgctgtggttgccagtttcccggcgcatcgccttcgtacgattccagctgccctgcgtatggcttttggacgtaacaataatgattcaggcttgtgggttgaagaactggtggagatgtcttcaatcgcacgccgctcaggtgtacttgcattggaacgcaaggttatggatcatccgcatccatttttgcaagacggtattcagatggttgttgatggtaccgatcaggatgtggttcgccagatcctggagatggagatcgattctattgaacaaaaacatgagggttacgccaaaatattcgaatccgctggtgggtacgctccaaccatggggatcatcggaaccgtgatgggactcattcaggtacttggcagtttgaccgatcccacaggactcggacctgccattgctgttgcctttaccgcaaccctgtatggggtcgccagtgccaatcttatctttttgcccattgcctccaagatcaaatccagaggtgccgatgaagtgcagaccatggaaatgcttctcgaaggtgtacttgccattcagaacggtgagaatccccagcttgtacgcaaaagactggagtccttcacccttacacatcgtcagcatatacgccccctagcaaaggagggattggatgagtcggcgcagtaaacggcgcggaaaacgtgaaactatcgatcatcgggatcgctggatgattacttatgccgatctcataactctgcttttaatcttttttgtcatcatgtatgccatgagcaatctggattccggtaaatatgacgtcgttactcaatcgttacaaaatacatttaatgcgtccgactcaatccttgagcttggtgagggactcggtgagaaacccggtcaaacgattacagagactccaccatctgaggttcagggtgaagatccttcaaatggtgaaggaaacccttccgatacagggactgcaacaccagatgatgacaacaagcccctcacagaacgggaagaacagttcagatcacaggagcaggaattgcaaaatctgttcaatgtgattacccaatatatcgaggataataaactggaaaatcagatttttgttgcggacaagccacagggcctatccattacacttagtgaccgcttcctgtttgatcagggacaggccgctctaaaggacggtgcagcaccaacgctaagtaaacttgccagcctgttccgtgatctgaacaccgttgtcagcattgagggtcacaccgataatgttcctgtgggagcaaactccgcctataccgataactggcagctttccggggaacgtgcactgtctgtattacgattttttctggatacagagaaacttaacccggacggattccagtatgccggatatgcggatactcgcccaacgggtgacaacaccacagcagccggaagacaaaagaaccgtcgggttgaaataacggtcctgcgtcaactccaaccttaatcatcaatatctcacataatgcatcattccttatgcaaagaaagcacgctctaactgaattcaattcagcagagtgtgctttcttttatgtcgtattaccttatgcctctactcctggctggctagggcgtagaatcgcagagccaacagtcagtaaaatggcagccatgccaaacaaaatcaatagtggcaatgtgatatccgacaatgtaccgccagcagagatcgtctccaccgcctgaatcgcccatttctgtggaacaaagttggcgagcttttgcatataatccggcatcaacgagatcggccagaaacaaccacctatcatacaggttggcataatgacaagtgaattcagcatattggcatttttgggattacggattaatcctgccacggtacttgcgatccccatggagaccagcatgaatgcagccaagatgatgaaatgaatgccaaaaggaataccggcatcataatgcagcagccacctgctgactcccaaaaccataacaatctgtatcatgccaatgacaaagctgccgaggaaattaccaagcgcaatctcatatgcacggacgggtgccgtatatactctggccatcgtacgtttcctgcgatcttccattatcacagccactgcactggtcaacagccccatcataaacatgattgtaaatccagtcacattgttcaggcctggcttgggatagatctgcagatcggtgacttcaccagcaacctgatgttttcctatctcctgtaaaagctgttcaaatggcttctgtatactcgatagtatatcagtctcacttgagacaggacctgccgccaccttaacagctgaagcagattgtaacaatccgctcgtcaaaccttcaactgctgctcgtagggtataggaactttcacttatacgcagttccaccaattgaatttcggttggctttccttgtaacagatcctccgtataatgtgccggaatgatgatgccagaacttcctttttgctgagcgatggctcccttcacttctgcttcgtttgtcatcggtttgagcaagtactcctccttgtcagcaagttcatgaatcatccatggccctgccacccctccatcctcattcacatagggaataacagtacgtgtaatctgctcgcttccaaaaagagcaactgctcctgtaaccaccaggcaaggcagaagcagaaacgtaatgaagcccattttacggccaagtgtacgtctaatcatcaaccaggcgatgtgtagactattcatatcggtatcctgcctttctatagatcaatcctgagatgagcagtaatacagcgcatactacgcctaacattagaatgttatacaggatctcagctacaggtgcatccagcatcattctcagaaaactttggagcgcccagtggttaaccgtaaattggctaagccgttgtacaaaatcaatcggaatgggcatgaacccaccactgatgaatgtcatggcaacgatgataccttgtaaggttgcactggccgatgctgtgcttttgcataccagtgcgacgatcacgccaagagtcatggaggccaatgttatacatacacaagtcagcacaatataccaaggatgggttccccaatccacaccgtagagccagtatgtcataaggatgatcgttgttgcttgtaagaaagcgagcagactattacctgcaattttgccagcgaaaataactccattacctatcggcgcagcctgaaggcgaattaacgttttgttatcacgctctccaaaaaggctggtactggttgtcatgcctgagtacaacatgaacatcgccagcatggaagctgcatagtattgggaggcactatacgccgtacctgtcttaccgggattagtgacagcaatcgaggttgaactcaccccaccagactccgaagcagagtccatggcagcaattacttccggaccgagcactttggtaatcgccatctgtcggttccattcatccgtaaaacgtgtgaacaaagtttcacccaaggtattaagtgtgttgtcctttcctcgtatccactgtaacctgacctctttccccaccatcacgcttttctcaaaatccgaaggaatcattacagcaaagtccagcttgtcggtacgcaaagcatgaacggcctcttcttcagtcgtaaagttctgcaccttgaccatctcagccacttccggggatttaacgaatgtatccagcgcttgattaaccgtacttgatcctccaccagattcagtgctcaaatggatgattcccacgcgtacagtatccggaataacatcatccgccgtacccatcgtactggaaagtgccgtgcccaatataaaaatcagtaacaacggcaaaataaacaggtttaacaccacagatcgaatcttaagaatacgccttaattcaaagatgcaaatatgccatatattcatctcttgttccccctagtcccgaagcgtacgcccggtcagattgaggaacaacgtttccagatccggctcttcgaccttgagcgactgaatggatacttcatgtttgctgcaaatgaagagcagatcctggagatcctgctgtgccgaaggcagcgtaatggtcagtgtattctctgaaacgtctaccatccgtacgcgggggtgaagtttcagttcttccacgacgtcggtaccgatatcggaagtggagagcactactttttcctccgatgctacccgttctctcagctctgcttcagtcccacaggcaataattcgcccctgatccataatcgcaacccggtgactaatcgccgccacttcctccatgtaatgacttgtatatatgatcgttgaacccatcttgttgagtgtccgtaccgattcaagaatatgattccgagattgcggatcaataccaactgtaggttcatccataataattagatccgggcgatgtgtaatcgcacatgcgatgtttaacctgcgtttcataccgccagagaaggtcgagggggcatcctttgctttatcctgcaaccctacaaattcaagggactcctgcactctttccttaagcaattttccacgcagtccatacagtctggcaaaaaaggtcacattctccgcagcagacatggtttcgtataaagccagatcctgcggaacgagtccgatcttgcgctttacttcaagcggtcgctccttgacagagatcccatctaatctgatttcaccctgatccatattcaggagccccgcaatcatgctaatggtggtactttttcctgctccattgggaccaagcaatccaaaaatctcgcctttgccaacactaaggttcaaatgatccacggacagcttgctgccgtatcgttttactacatgatccacttcaagtatgcccatcccttttacgccccttttccgtttcggccttcgccgctggatttcataattttattgtaacggatcgcaatctgtagcgaaggtacaaaaagtcatgaatcgaaggtgacttaagtcatctcctgattcgaatgctgcttatggtataatcaagggcgcattaccaagagattttgtactccactttttatataaaggatgtcatttacatatgcccatgcggtttctgcaatatggattaattatcgttccagcagtactgtacctgttgatgctgcccttggaaaacgaagccgtctacaccctgtatatcattatcgcgcttggactctccgtgtggaaagattttaaccgttcaagtacacagcaatggctgttgcttctggccgaaatactctggagctgctggctgatttcttcgtatggaccatttatgtttttcctctctctatccgtgctctacgtgtgtatatacagactggtgggaagtcggagatggttgatgtttgcaattcagcttgtagttaacaatgtcgctttgcattggtattattctgtcccacaggcatcgcagccagggttaaccacactaaatacaaccgccactacattactctccccagagacaactgcgatggttcttggcaacctgcttctgctcatcacagcggctctgtcctggcagggatcaagaacggcgagcagccgcggacaactggaacaagtctatgacgaacttcgcagcaaacattacgagctacaagaaactcgtgcgcagctgctgttatttacaaagcaacttgaaggagtagctcaggcagaggaacgcactcgtatctccagacagcttcatgatgatatcgggcatcgactgattcgcaccaaaatgatgtcggaagccgccctgctgaccatccccctcgatatggaacaaggaacggaaatggtgcgacagattcgcgatcaattggccgatagtatggatgatatgcgcagcacactgcacaaactgcaacctaattcctatgcatccgaagcctacgccctggatcatctcctagaggaagtgggcagagataccggcgtgaagacaaattatgaagttcatggcccatcccatgtgctgtatcccagcatacaaattgttttgttcaaaaatgccaaagaagccttgaccaatgccctgcgacacggtaatgcttcttcgatcacagtggagttggtattcggggaacaggaagtgtgtatgagtgtaagtaatgatggcaaaatcaatcctcattcttccaagcgaaacggcataggacaggaaggcatgcttctgcgcacacaaatggtgggaggagtcctggagattcaatcggcttatccgtatacagtgattacacgcattccattaacgaatcagatggatatactctgaaaaaggaagtgaatgttctcatgtccgaacgtaatgatgtgaaccaaaacaatgattcagcccaactcccacttattcggctgattctcgccgacgatgattacttcattcgtgagagcctgaaagtgttgcttggactcgactctggcattttcgttacaggcacggcctcaaatgggcaggaagcgttggaattgcttgaatcagggacgtctgcggacgtggttttaatggatattcggatgccggaatgtgacggagttgaaggtaccaaacgcatcaaggcacgttttcctgaaatccaggtgctcatgctgacgacgtttgacgacgatgagtatattattcaagcattacagaatggagcaagcggttatttgctcaaaaacgtcccccccgagcggatcattcaaggcatcaagaccgtacataacggtgatatgttaattcatccggatattgcccgcaaattggcaggccttcttcgtcccgctgcaattcccctgacacagaatccaatcgaagcctatggactgacacgtatggagttggcggttgccgaggccatatcggaggggttgtccaataaggaaattgccgccaaactgttcctcagtgaaggcaccgtcaaaaactatgtcacggatattctcggtaagttgagcttgcgtgatcggacccaaatcgccatctttatgttaaaacaataacaaagaaaaaggtatttcccttgcctgtgacggcgctcggaaatacctttttctttgttttatttatgcaacatacttcacacgtatgcttagttgttacatctctatggaccctttatcactgcccacaggggctggcggtaacgccaagggagcttcgtccctgagtggttttttcagacgggcaaacaatttgaggttgatgatatggaacaacgtcagtggacgtaaccgaatcgcccaaacctcgtgattgtccggtgccataatgaccccaagctgatgatgctccccttcatagatcgctcgttgcatgaacttgctttcaccctggtgattgcgaacctcaagtttgcaaaaagccgggttcatccgcagagcacgatgcaactcttctggtgaatgaaccaacttaccattcaccttgtacaaggtctcacctgcttcaatccccaaatccgctgcagggctctccggaataacagccaatactttcaacccatgctgcggatggacaaataccggactccggttttgctcttcaaacgcgctgtaccataccagaaattcatgtccaataaatgcgatcagcgcagcaaccaccataagtggagaccaccatgcagcaagcaaactgaacacgagcaaagttgccccgtatatcatcaaccgcttggatgagatctgtaccttttgtcccggaagcatactctgcgttatctcaccaaatccgagcataatcggcaacgcaaccagcatgtaactatgacctgcattcatcagtggattccatgccagctccgcgtcacctcctgtgactggaacaagaattagtagaggaatggcccagaactgctgcagttgatatcccccaaccagtttcccgcgttttccctcgaagagaagtggtgatgccatcgataccccctgcatgcgtaccaacaaggcttcacccatatgtagaagggcagccaggacaagcagtgcaggcatatccagggtacgtagcgtttccgtgatagtgcccatccaacccgatggttgccagcctgaagccacattcaaaccaaattgcagcacacccagtaacccggccgcataagcaaagcacagataccggatacggaataaggatagaattaatgttgcagcccatatgcatatcaggcttcccagtgtaaggtgtgcaccgaggaatagggacacgatcgagacaatggtaccgatgagtatgcctccgagcaccgcacgaatcgtctgtgttatcgagctttgcaaacggacatgaaacaatttacgctcctgtagtaactgacgatgatagatcagcgcaatcaggatcaccgcaatataataaaacggctgaataaacaactgcaacaaagcttcccctaatgtagttaaccacggccatacccattccattgtggtcggtcacccctctctttcagccggttcagaaaaaaagaaggctgaaaatcagccttctttatggcttcgacacagcggacgaaatatccttcgagacattttcgatcgcgcgtttcagctgtgcatcatattgaggattggcaatacgttcaatcagagccgcttccagtgattcagcggttttctcgtcaatctggcctgtagcctgaatgcctttttgcttctggaatgccttgaccgcttcttccgtcttctggtcgtagtatccatccacacgatccggtttgaaatcgagtcctctcagcatcgtctgcgcacttttcacatccgagctattgctgtcatatttcagtggtaacttctctttgttaatcggtgccaccgagaaataatccggctggtctaccgcaatatccggtttgattcctttttcatgaatccagtctccgttcggagtgagccacttggcaatagtgatcttcagcaagctgccatcacccatctgcttgtcataactcgtctggacggttcctttaccaaaggagttttcaccaatcaacttggcacctgctgactgttgtaatgcaccggccaaaatctccgacgcactcgcactgcctttgttcatcaggactgtgactgggtaagctttggctgatccattggacttgctttgttcctttttgccgttcttgtcttcaacttgcacaataaccttgcctttaggaacaaactgttcagcaatatcaataacaacttgcaatacaccgcctgggtcattccgtacgtcgatgaccagacctttcatgttctgcttctcaagcttcgccaactcttccttaaagcgatcgcctgtattcaaagagaattgagtaatggcaataacaccaattccgccatcctccatgtgagcatatacggtctccagatcaatgtcatcacgtacaatgacaaattcaatcagctcggaagatccggcacgtttgacctgtaccttcgcttcactgcccttgggacctctgattttgttaacagccttgttcagttccaaaccttgcagggattcgccgttgaccgacataatcatgtcttttgcacgaatacccgctttctcggcaggagatcctttgattggggaaacaacaaccacgtttccatcctgagaggatacctctgcgccaataccggtaaatgaaccttcgatcgactcttcaaactgagcagccgtttcctgccccatatagttggagtacggatcaccaagcgattccatcatgccgttgatcgcaccgtcaatcaatttggtctgatccacgtctttataatagttgctggagatcaaatccatcgcagtttcaatctttttcaaatcgttcttctgctgtgtattgccggttacactagccagcaaaccttcgcccgctgtggtttggtttgctattcccgggtaagtcattagtaccagggttagcaaactaccacccaggagacccacaatgacaagcagtagcgccgatcttttcttcatcatccgtttgtcaccgcctttagttttgaagcgtgtccgattccattgttgccagaatccattccctgaacatgccagcttagtatatgtctagcttgtacggaatatgttttttccattcgaacgatggagcaataattacaaatagttcatcggatttacagcgttaccgttgtctctcacttcaaagtgcaagtgaggtccagtagagttccctgtatttcctgactcagcaatggtatcccctttgcttactgtgtctcccttgctgactttgaatccaccttctcgcaagtgaccatataacgtccatagtccaccgccgtggtccacaataactgtataaccataaccgctataccattcagccatgatcacgattccgccagaagcagcgtgaaccgaagttccctgaggaacagcaaaatcgacaccggcatgcattttacccactacgcccgtaattggatgggtacgggggccgaatccagaagaaatacgtcctccagataccggtcttgagaagataccattcccggatgaatacgtgacctcactgctactatccgaactcactctagtaggcgccttggctgcagctttcgcccgagccgctgctgcggcttttgctttggctgcggcagctgcctgctgttcacgcaatttatttttctcttgaagaagtgccgaacgtttgctggcaatctgcattaatacatcttcctgctcttgtgtcagctcttctgactcttcaattttagcatcatatgaagcgagaagcacttgcttttccgcttctttttcattcaattgggacttacgctgtttcttctgtgcatacaggctcttggcttccgcatattgcacatccaattctgcctttttgtccacgaccagttgcttgtccgctttgtgctcatccagcagatgctgatcctgatccacaatcgttttgagtgaatccgcacgggtcaggaagtcagtgaagctagtagaggacaacaatacatccagataggatacagcaccgtccgtatacatcaggcgcacgcgtgactccaacaatttttcccttgcaacaatgcgttcttctgccgcttgcagatcttttttcgttgtacgaagatcttcctccgtgttctcgatctgcaaggatacactcgccagttcatcactaacgacattgatctgttccatgacaaccttcagataagcgttggttttgttcttgtaatgctgtgcttcctttttgttggaagccgcttttttttgctcctgcttggcagaagccgccttgctctccagttgctgaatctgttggtcaatatcgctgatgctactcttggcatatccgtcagaaggttgaagcgtcaaactggccaataacgtaaaggccagcagcgaagcggtttttttcaaaatgatgatcccccatcctatgatttcacaagaaagcaacctgcacaggtggtgaacagcatgttctttgctttcttcaatcttaaaagactccgtctttcctacatatcgtcaaacagcgtccattaatgaacctgctttaccattcttttcgacatattctgcaattcgatcgttgaaaacaaaattaaacgttgagtgatttccgaatggacagcgtacttcccaaaatacctaccagcacaccgagtccgatcaacagtgttccaaacagcccccagatttcgccgagcggaatcaagttaagcatctgcatgaagacatcctgaccaatcgtcttcatcaactggctgtatccaacaaacagcacaccaaccgtaatgaccgagccaataaatccaatgagtgcaccttcaataaagaaaggccagcgaataaaggtattggttgcaccaaccagcttcataattccgatctcccggcgacgtgccagaatcgttacgcgaatcgtattcgagatcaggaacatggacatgagacccagtcccccgacaaaaataaatccgatgttacgaacaagcttcgtaaatttgaacaacacttccaccgtttccttgccgtagttcactttcatgatcggcttctccgggtgtttttcgttcaaagcttcgattttttgcgccacaaaagtgacggtttccggttcaatgacctcaacttcaatggtctccggcagtgggttgttgtccacatcgaaaccgctaagcacgttatctgcgctctctccaagacgctcacggaactccttgagtccttcttccttggaaacaaaacgaatctcacttacttcaggcatcgcgctgatttcttgctccagtgtgttacgcaggttctcgtccacattcagttcgaggaacgtgctgatctccacctggctatcaacttgattcgccatggagttcacattgaggaccagtagcataaatacaccaagaatcaatagcgacacaatgatggacatgatggaggccacagacatccagccgttgcggaatacgtttttgaatccctcccgcagatggcgcaagagagtactaaaattcataaccgtattcccctctcatctgatcccgtacaatctgtccacgttcaatcgcaattacccgcttacgcatcgtattcacgatatctttgttatgggttgccataacaatggttgttccccggaaattaatctcatccaatagttgcataatgccccacgacgtctccggatcgaggttacctgtaggctcatccgcgataataaccgatgggttattgacgatagcccgtgcaatggcaatacgctgctgttctccacccgagagctgtgaaggttcgcgatttgccttgctccgcagtcctaccaagtcgagcacttccatcactcgttttttgatatgacgcttcggtgcttcaataacttccatggcaaatgccacattctcaaatgctgtcatccgtggcagcagacgaaaatcctggaacacaacgccgatgttacgacgcacataaggaatctttcttggcttcaacttaccaatattaaatccgttaatggatatttgtcctttggtcggaacttcttctctgtacatcaatttcataaatgtcgatttacctgctccggacggaccgacgatataaacaaattcattgcggtcgatcttcaccgacaccccttgtaatgcgtgggtcccattggcgtaggtcttccacacgtcctgcatttctatcacatcatcacttcctgctcgcatagttagccattatcatttcgacacaatcccggcatttcctttaaaaagacctgaatttcatcagggaaaaatccacttcgttcctgtttcaatggtgaagcatggatgcatatgaagtttattgtaacaaatttgttacctattgagtacccgaaagttttcctgcattggatcatatatatagaaagtgttacaaagtcgggaacaaccgaagtataaaggagcgtacggttatgaaaaaaatacatttgacggtcattgttctattctccatcctcttgatcggctccgcgtcctatggattgttgtatatgtacgtaaatcagcctgccctgcccaaaaacgttcatgttggcgagatgctggtggaggggaagaatcgcaagaacgtattgcatgaattggatgaacagatccaaaagctggaggactggcctgtcacctttgaagtgactgaacccaccccccagacgatgtcgtataccgcagctcaggtgggggtgagctacaacgttaacagcttggaatccgcgatacagcagctggaggaaggtaatctgtgggaacgcgcttatgcacgttatcattttccgaaagagttctctctcgatatgacctacaactcaagaccactccaaaaacatctcagccctgcctgggaaaaagaaacctttggtacacctgcggacgctgttcgccgcattaccacaagtgaccaagtccagtatatcccggaaaagggcgtccgccgcattgattgggatacactcacaagtctcattcagaccaagttgcaccgagatttcagtgtactgaacccggatgaaaaaccctccccattgctgatccaggtaccactgtatacgctgaaacctgaagtaactcttgattcgttgcgccaggaaggcattgaccgaaagatcatccagttctccacgggtctgggcaatagtagtgaaggccggatacataatgtcagcgcagcagcggaagcgattaacggcatgattttgccaccagatgccacattcgattatgagaaggtcgtccgtcaagctgaaaaggagtatgggtttcgtgaggccccggtcattgttaatggcagactaacccccggaattggcgggggaatctgtcaggtatccagtacggtgtataacgcagcgctattgacaggtcttgatattattgagcgtcgcaaccattccctgccggtcaaatatttgcccaaaggactggatgccacctttgcctcgggagccatcaattttcgcttcaagaacaatacaggaaaatccttactcattcatgcagaggtgaagaaccatcaattgatggtgaaatttttcggcacattcccggagaatgtcagctatgcacttgaatctcgcacaattgaaacattaagtgttccggtaaagtatgtgtccagtactgtactgcctgatggtgcacagcaggtgctgcaagacggacagcctggatatattgttgagacggtaagaaccaagaggctggacggtaaagtggtcgaatccaaaacgattacaagggacacgtacaaagctcagaatcgcctgattgcccgctccggtcatagcagcctgcctgacccacaagggccttctgtggtcgaggacgggattagtgatacgaagcagccttaattttttttcaaagcaaccgacaacttacagatcacggaatggtacaaacaaggtcctgccgtaattcatggataaacataagctgatcacacgaaaacaaaaggacacacttcacgtcccttttggggataagcgagaagtgtgtctctacattttcaagataagttattcgagttttaccaagctgagattagctttactaccgtaacttacggtttactgcattacggtttagtgaccgccggtgtattcgccttgctcttcgcctacaaccatcttctctcttcccatgaagaaggaagcgaccaacgcgagtgcagccggaatcacagcccaggcaaataactgcacgatggaagaggacagggcatgtgtgatggtatccagcacctgaggcggaatcgcctgtctgagttctggtgagagtaacgcatgcggatcggtcaggtccactccctgcggcacgccacccgctgaagcaccgcctgctcccgcagctgaaccagcgagagcatcgttcattttacgcgtaaatacctggctctgtacgataccaaagatcgtaatgcccatcgtcataccgagggaccgcaaaaagttaagtgtggagcttgctgctccgcgcctttgcggttcaaatgcgttcatggctgcattgctaagtacagagaacgacgcaccgacacccagaccaaccatcaccatgtagatacgtatcgtccaaagggaagaattctcatccagtgtggtcagcaatccaagcccaatgacaagtaaggccaacgtaggaatcatgatattacgatacttgattttggtcatcagcaccccgcccagggacgccgtcacaacagacccaagcatcatgggcagcagcacaagaccggagttggtcgctttaccaccgagtaccccctgtatgaagatcggaatgtacacggatgctgtaatgaacgccgcaccactgaacataccaataacgttactggaccagtagacccggttgcggaacatgctgaaggagatgattggttctttggcttttgtttctgcaaaaaggaagagcagggctaatgctacaaatccggcaaacaagccaagaatctgccacgaaccccaggcaaatgttttgccgcccagttccagaccaaagatcaggcacacaacagcaccgatcagtgttacagcacccagccagtcgatctgttgggattgatgctgatgggattctttatagaagaacgcaataaacacaaatgcaatcaagcctagcggcaggttgatatagaatacccattcccatgtcgcatactgggtaatgtaagcaccgagcagaggtccgaatacgctggagaggccaaagacggctccaaacaatccacccaatttaccacgagattctggtgcaacgacatcaaacatgatcgtaaaagcaatcggcaccagggcccccgctccaataccttgaatcgctctgtacatcgtcaattccacaatagacgttgccgttccgcacagcgctgagccaagcataaacacaataataccaaatacaaaaaacttcttccgtccatacatatcggatagcttaccaaagatcggcatccctgccatctcagccaccatgtacgcggaggtaacccagacgaacttgtcgagcccacccagcttcccgacaatatcccccatagctgttgccacgatggtattatccatcgaagccattagtatgctgagcagtaaccctgccagcaccaatccaatactgtttttacgtgcaaccattgtactcaatctctccattcacgctctattcatatgactgcattagtatatccgaaatgaagtctgcgttaatcagtccaaggaccgattgctttgcagcaaaacttccgattgcggatgaatttgcagagatgaacggtattccactgtaccaatccggcagccaggaccgatttttattttatcgccacggacaatctcggcctccgtattctctaattcaatgtcatcaccttcgataatctgtgccttgagaattgatttattccccgtaaacaagtcattcaaccggccactcttcaccgagatgatggaaccacccatttccttgacctcggatggacccatgattttgagcgtcatttgttcagcgctgagcatccccgctatcgtcaaacgcccgttcagcttgatattttccgcctgacaatcccctgacagatgaagttcaccgaccacttttatatgctcagctttggcatgcaggccagatgcctggattccatcctcaccatcgttgctggtctctcgctctgttagagtcagggttccggtaattttaatatctgtggattcaagcgatccgtatatgaccgatgtacccgtacatttgaatcgttcacaagatagattgtcgttaaaggacgcgtcccctacgaccttgatcttgccgtacacgccaccagaagaactgccatcaccaacgatgctgatatccatttttttgtccaatgaacgcccatgattgttattcatgtcgatcccatccctttctctccatatccaaactttaaattcgctgactgctgcccaccttggcatcctgatctacctcaagttcacctgaatactcaaccagtctgatgttacagccgcgaccgataaaaatgttactcccccgaacaatatcagcttcagtatcttccagcacaatctcatcaccttcaattaaggatgtcttaaaagaaggggtcccgcccagaccaatacttttccaaaatccattctgttgttccttgcgacgaatatcgatacgctctccgccaatctctttagccgaagaagatgtatgcagcctgatctccactgttcccgcattcagtaaaccgctgatcttaatattgccccgtacattcagggactcacattggacatccccttcaatatcgatcacaccgccaatatcaattcgttccccatctactcttccacgtacggtacactttccgttcacttcaagttcagggctatggagatctccgttaatcgtcgtcatgccatccacccgaacacgagaactggtcagaggtccattcaacgtgcacatgccgttaatcgctacactctcggaggtcaaagcgccgtgcatcttcaatgttccattcacttccatagaggtgcagtccaggttgccgttcaccttagccatgccatcgatagatacacggtgaaaattcccgcctgccgtttgactcatgcccgccacattcagatcattccgcttattccgctcttccatagatgatcctctccttatcccaatttgagttttaattcttccataaatgttcccatcggctgcctaagaaccactttcacaccattgtcaaaataaaactccgttcctgctgttaccagcatgaatgaaggaacacccatcttacgaataagcacgagttcgctgggtttgcctgtaaaacgataataatgttcggacatcacttcgatcagcaatgcaccctcttgccgagtaatatctccgctcattaacagcttatcaaggacgtagagcatcataatctgctccaaagcatacagcggttgttctcgacctgcttcttttaacagatccagcgagatttgtgaaacaatgtttcgctctaatagtagctgtgcagacatctccacttcacccaacgtaggtgagaacacgtctgccagctcatccagcgataatccgtctttcatattgagaatcttgtcaatgcgcagtaaaatctgttgtttgggaaaaaaggtctcttgtccggtgtaggacgacttccgaatgaaccattcttccggaatgagatttttccgcttccagcggtacaactggccgtatgagattcctgtcaggtccaacaattctttcttggagatcaaatcatccgtcatatatggtccccctttttattgaaatgagtgtaacataacattgttacgctgtaaagtgcgttaaaaatcgatgatcagattacagatttccactttaaccactggtgtgaaattctttgttttctactgtagatcttgttattgcaatggaagcgtaatgcgtataacctgttacatataaacactttggaggcctaggcatccgattttcatcccatcgtctcatgtcagaacacttggttaacgaacttatgaaaggggtttcttatactcatggcacttattaaatgtgatttttactcggatacgctcgggcttagcaccagcatgcatgtcattctgccgcaacaaacccacaatcagatcggcatggagaatgtgactggcaaaggactacacccaaccctgtacctgctgcacggcctgtctgatgatgattccatctggctgcgccggacttccatcgaacgttatgtggccaacctcgggatcgccgttgttatgccacaggtacaccgcagcttctatacagatatggtagaaggcggacgttactggagctttatcagtgaagaactgccggcacttgctcgttctttcttcccgctgtcagatcaacgggaggacaacttcgttgccggattatccatgggtggctatggggcgttcaagctggcccttcgtaaaccagatcaatatgcggctgcagccagtttgtctggagcactcgatatgtctgcacatatggatagaaacgcatcctcagcattgcaacagacggagttacaacgtattttcggaccagaggtggcaggcaccgagaatgatctgatccatctgttaaaagaaaatcaatctagcgaaagtcctcgacctttgctctaccaatgctgcggaacggaagatttcctgtatgaggataatcaaaccttccgtcaagcctgtgaacagacgaacttcgaactgacgtacgaggaagggcctggtgaacatgagtggggctactgggatgccaagattcaggatgtattgaaatggttgcctttacaaaagcgcgattagtggagaattgcaatggagctaccgcgagtaactaaactggtactccgatagtagaacaacctaacatccgttcgcggttgagtagaatgtatctaaagcacatcgctgtaaaacacaaaaagcaggccgctgagaacaaagttctctggcctgcttctttgttgtactgttgtatctgtaagggtaccttatagtagcggttgtattaaccgcggttcgtaatccattgctcggtgatctccagtaccttctcactgcgcccgatggcttcagcgacttgacccgaagcagttccgccgtaaacattacgagcgttcactaccgcttccggttgcagcacatcatagatccggtcatcaaacagtggtgagaactgacggaattcatcaatcgtcagatccagcaaatacttgctgttctggatgcagtacagtaccgttttaccaatcacttcatgcgcctgacggaaaggcaagccttcgcctacgaggaagtcggcaatatccgtagcattcgagaaatcctggttgaccgcttgacgcatgcgatccttgttcactgtcattgtcgcgatcattggagcaaacagttgcagtgcaccctccagcgtcgctactgtatcaaacatgccttctttgtcttcctgcatgtctttgttgtatgccagcggaagagatttcagtactgtcagcaaaccgatcaggttgccgtacacacgtcctgttttaccacgcacgagttcaggaacgtccggatttttcttctgaggcatgatgctgctgcctgtgcagaatgcgtcgtccaattccacaaaaccaaactccgtgctgctccacaataccagctcttcactcagacgggacaagtgagtcatgatcagcgaagccgccgccaagaactcaacgataaagtcacggtcgcttactgcgtccagactgttctcgtaaaccccatcaaagcccagttgttccgccacaaagtgacggtcaatcgggaatgttgtgcccgcgagcgcacctgcgcccagtggcagaatattaatgcgtttgtagctgtccatcagacgctccgcatcccgttggaacatggatacatacgccatcaggtgatgagcgaacagaatcggctgtgcccgttgaagatgcgtataacccggtactatcgtatcgaggttatctttcgcttgtccaatcagtgcttcctgcaaggagtgcagcatgcctacaaatccaaccacgcgttcgcgcaggtataggtgcatatccgttgcaacttgatcgttccggctacggcctgtatgtaatttaccgcctacaggaccaatcgtctcgatcaggtttttctcaatattcatgtggatgtcttcgtccgatacggagaattccacttcgcccgcacggattttgtgcagaacggtgatcaatccttctttgatggtctctacatcttccgctggcagaatgccgcatttgcccagcatcgttacatgagccagacttccttgaatatcttcctcagccaaagccttgtcaaaattgatcgatgccgtatattcctcaaccaaatgattggtttgttttgtaaaacgtcctccccacagcttgctcacggtgagtactcccctttcgctcatggacaaagccgctcctgccagatgtgcaagaacggcctgtcttgtcatttatattgatatagctctatagatgcaggttgaaattagtttttgttttgctccacgccggagtttactttcaaacgcagtgcattcaggcggataaagcctgttgcatcaccttgatcgtaggcttgcgttggatcagcttccatcgttgcgatgtccggattgtagaggctgacaggacttttcacgcctgcgccgatgatgttgcctttgtacagtttcacacgaactgtacctgtaacgttcttctggctttcagtcaccagtgcttgcagcgccagacgttccggtgcgaaccagaagccgttgtaaacgagtgtgctgtaacgtgtgatcaggctgtcacgcaggttcatcacttcacggtccatcgtgatggactccattttgcgatgtgctgtgaacaagattgttccacctggtgtttcgtatacgccacggctcttcataccaacaaaacggttctcaaccatatctacacggccaataccatgtttgccacccagctcgttcagttgctccatcacttgcagtgggctcaagcgctcaccgttcagtgcaacacagtcaccttgttcgaattccagttcaacatattccgcttgatctggtgcatcttcaggtgcactgctcagcaggaacatgtctttgttctcgtccgcgcttggatcgaaccaaggatcttcgagcacaccgctctcatagctgatatgcagcaagttacggtctgtggagtatggtttagccgcagaagcggttaccggaataccatgtttctcagcgtacgcgatcatctcggcacgtcccgggaattggttacggaattcttccagacgccaaggtgcaattacgttaatgtctggtgtcagtgcagccgcgttcaactcaaaccgaacttggtcatttcctttacctgttgcgccgtgagcgatggctgtagcaccttctgcacgagcgatgtccaccatacgtttagcgatcagtggacgagcgatacttgtaccgagcaggtattgtccttcataaagggcaccagcttggaacattggatagatgaaatcttttgcaaattcatcgcgcagatcgtcaatgtatactttggaagcgcctgttgccagtgctttttcctccaaaccgtccaattcatctttttgtccaatatccgctgtgaaagcgataatctctgcatcatatgtttctttcaaccatttcaaaattacagatgtgtccaacccgcctgaatacgcgagtacaattttttccttagccatgttcaatggtcctccccaagatcagttaagttaaacagagccttcatacactgaatcctacgagccagaaaatccttccgatcactgttatccccagatttttttcatccctttatgacaaagggtaaaatccggggataaaggtgaacgcttcgcttcttcaggctttttctgtctctccgtgtttgtgtatgcttcttgtttaattaactttttaaagtacattatagatgaatctatcatcgcgaaatctgcgcctaaaatcaacccataaaggcaaatagcatctattcgctcattaatgcagccattaatgctttctgtgcatgcaagcgattctccgcctgatcaaagatcagagagttcggtccgtcaattacaccggcactcacttcttcgccgcggtgtgctggcagacaatgcaagaacatgtaatccggcttcgcgcctttcatcagttcctcgtccacttgatatgcggcaaatgcctgctcacggatcttctgctcttcttcaaagcccatgcttgcccatacatccgtgtacacgatatctgcatctttggctgcttcctgtgcactgtacgttacagtcacttcagaaccgctctcctgtgcgataatgcgtgcctgctccacaactgcgctatccggctcgtagccttctggcgttgctacagcaacatgcattcccatcttcgctgctccgagcatcagggagtgtgccatgttgttgccatctccgatgtaagccattttcagacctgcgagcttgcctttgtgctccagcaccgtttggaagtccgccagtacctggcaaggatgcgccgcatcgctcaggccattaatgactggaacatccgcatgctctgccagttcagttacattatggtgtccaaaggtacgaatcatgatgccgtccaggtagcgggacaatactttggctgtatcatgtgttgtttccccgcgacccagctggatatcatttttgctcaggaagagtgcgtgtccgcccaattggaacatacccacttcaaaggatacacgcgtacgtgtggatgatttttcaaaaataagtccgatcgttttacctttcaacggttgaaaaggtacaccgcttttttgcttgcctttaatctcgatcgcgagatcaagcagataacgaatctcctctgccgtgtagtccgtgaattcgataaaatcccggcctctcagatcaatcttttgaaccttttccgtctgttgtgctgtcatgtataatgtcctccttatttccggttccctgcacccgcatgggcagaagagagagcaacgttaacactttgtcttggcgcttctcaagtttattccatttccaccttctgcaagttcaccacgcggctacagggattcatcatctcattctgcttcgaggccggtaatggccccgagacagaaaggttctcatttttatattaggctttcgccgctacatgctcttcgatcaatgtgcctaccagcgatacggcctcgtcgatctcttctttgctcacatacaggttcggaagcaaacgaatcacattcggtcctgcagagacgaataagataccgcgtttttgcccagcaagcacaatatcacctaccggctcagcacattcgataccgaccaacaatcccaagccacgtacttccttcacaaaggaattgcccgacaaacgtttccgcagggagctcatcaggtattcacccatctccgctgcgcgctctggcaaacgatcttccagcatcgtttcgattgttgcaatcacaacggatgaagcaagtggtgttccaccaaatgttgtcgcatggctacctggtgtgaacgcatcccgcaggaaacctttacccaacatcgcacctacagggaaaccactaccgatacctttggcaacggtgaacacgtctggctcaatgccataatgttcgtgcgcgaacagtttacccgtacgtcccattcctgtttgtacttcatcgacaatcagaagcaacccatgctcgtcacacaatttccgtacatgtttgacgaattccggttcgaccggatatacaccaccctcagcttgaaccatttccagcataatagctgctgtgttgggtccaattgccgcttcaagggcagggatatcatgcaaaggtacagttacaaatccggctggcaatggcaaaaatccttcttttaccttatcctgtccggttgctgtcagtgtagcgagtgtccgtccatggaaggactgggcaaatgtgatcacttcataacgatctgtgcctttcaccttctggtgataacgacgggctactttaatagccgcttcgttcgcttcggcaccactgttacagaagaacactgcgtcagcgcatgtattggctgtcagcaatgctgctgccttctcctggcccggaatctggaacaggttggatacatgccacaactcatcaatctgagctttcagcttggctccaactttctccggtgcatggcccaggctagttacagcgaggccacacatgaaatcgagatagcggttgccctgatcgtcccacaaccagctgcccttacctttgaccagactgattggataacgcgcatacgtttggaaaagcgagctttccgtctgtcccgctgcacctgttgctgttgcgcccgctaccgctgtgccagaacctggctgttcgttgccttttgccatgaccatatcactccttattggttggtgcaacggcaattatataagagctcttatttacactagatcactccgattgcggaaccatcttccgaacgtatgcatactccacttcgatgacagaacaaccttccgatcgctgttatccctggattttttttattccccttcaatggggaaaatcctgtgataaaggcgcacgctccgcttcttcaggttatttctgtcctctccgttatgcatttttattcttcagattggttctgcaccctacgttattgtgagtgtaatattagatttcttatataaaaaagccgtgcacatatttttttatttaaataagactattaagaccctagcgtatcgagcaaattattgcatacggatgattcttgttccgatgatttctccgccgagcactcggctcaggatctggggttcgctgccgtttacgatgacgacctcacgtacttggccatgaatacatgcaattgctgcacgtactttgggaatcatgccgccatagatttctccggtctggatcatgtcctcaatctcttgtacagatacggatggcagtacttttttctcgccgcctacgttcttcatgatgcctggaacgtcggtcacgacaatcatccggcttacgcctagatgagacgccaccgcacccgcagctgtatctgcgttaatgttgtagcgttgtccagttgcatctacaccaactggtgcgataaccggcatgtaacccatattcacgatgccttggataatctctgcgttcacaccagtaacatcccctacccaaccgatctctgcgtggtttgtaacaggtttagcctggatcagaccaccgtccacgccggacaagccgagtgcacgaccgcccacacgctgaatcaagcgcacgatctgtttgttgatactgcccgcaagcaccatctccactacgtccagcacaggttcagttgttttgcgcaggccgttaacgaattcggtttcgatgccaagcttcgccaggttatccgagatcgcaggacctccgccatgcacgattaccggctgcgtgccctgagactgcagatcacgcagatccgcaaagaaagactcgggcaatgctgccagcgtgctgcctccacatttcatgacaaacatctgtttctctgtgctcgcttccgtggaggtactctcgtttggcattgttgaattcatgagggcaagctccttccatagtaaaaattacattcaaaaaaatataacacttttataaggtgacgaaggctgataggagtccattccgaattcggattgttctttcgatcgctgttgtctccaggtttcttgaattatccctatataggggaatacccggagacaaaggcgaccgctccgcttctgcagaatcaattccgtcttctccattactatcgctatatgtccaacaccaaacaacaagtttaaatttcattgataatttttgaaacatctcacgaaacagcttcacaatagaagacagctgtttcgtaaaacctttaccccaaaggtttattacgtgcggtatgcggcgttaattcggacgtagtcatacgtcaggtcgcagccccaggctgttgccgttccctcaccgtgatgcagatccaccacaatgcgcaccgtatcggtctgcaaataggccaatgccaattcttcgtcaaacacgactggacgggactgcgcgagtaccgaaatatctcccaaacgaatatccaccgtatcagggttcaccggttgccctgcacgccctacggctgcaataatccgtccccagttagcatcagcgccaaacatggcggatttcaccagactggacccgatgacggttttggcaatggcttgcgcggattcatcacttaccgcaccagtcacttctacctcaaccagtttggttgctccttcaccatcgcgagcaatggctttggccaacacttggcatacataggtgaagccggctgcaaaagcgtcccaatccgggtgctctgttgtcagctcttcattgcctgcatatccactggacatggctaccagcatgtcgtttgtacttgtatccccatcgacggtaatcatgttaaatgtatgattggttgcctggcgcagcaagcgttgcaacgcttctgcaccaatgaccgcgtcagaggtcatgaaagcgagcattgtcgccatattcggatgaatcatacccgagcctttggcggctcccgcaatcgtaaccgtcttgccgttaaccataacggagacgcaagcttccttttttaccaaatccgttgtcagaatcgcttgtgaaaattgctccgcctcattcgactccttgcccatatgcgctggaagaccagtaatgcctgaatgtacagcatccattttgagcaattcaccaatgacacctgtggatgccacagccacgtcctcttctgccacacccaactcacgcgcagccgccgaacgcatcgcataagcatcttcttccccttgttgccctgtacatgcattagcattaccactgttaacgataacagcctgaaggcgtccgttgctcaagctttcgcgcgttactttgagtggtgctgcttgaaacacgttcgtcgtgtatacagcagcagctatagccggtacatcacatcggatcgcgccgatgtcattgcgagatgtctttttcaatccgcagtgaagtccaccagcagtgaatcccccaggggttacaattgttccgttctcaaccacggtaaaagtctgttgctccacattcgttcccatatcatatcccccgtatgcgttcagctaaatgctgatgatccgcccgcttaacctgatccgttctccctaagtgactccgagaaagcactctacaccgaatgttccagtgctcctcctgaattccaatcccttatggatataccggtgtcatgttcagcccgaggttctcctcccatcccatcatcaggttcatattttgaatcgcttgcccggaagcacccttcaccaggttatcgatgaccgaaataatcgttaaacgacctgtgcgaggatccaccgcaaacccgatatcacaatagttggatccgtacacttccttggtcgaaggccaaatgcccggttcacgtacacgtacgaaaggtcggttctcataatatttgcggtacaaatccacgatctcccggtcgctgtgttccccaacgaggtttgcatacatcgtactcataattccacgtgtcattggcaccagatgtgttgtgaaggtaactgtaacaggcgtccccgttatattgccaagcacttgttcgatctcgggaatatgttgatgtttattcagtttataggctttgagattctcgttcatctctgcataatggtacgacagatgggttccacgtcctgcaccggatacgcctgatttggcatcaataataatagtagaaggatcaatccagcctgcctctacagcagggatcagtccaaggagtgtagccgttggataacagcccgggttggaaataaaattctgtcccttcacttcttcgccatacacctcagccatgccgtataccgcttgttccagcaaatcagctggaggcgccggatgtttgtaccactcttcgtacactgttccatccttaagtctgaaatcgccagacaggtcaatcaccttaagtcctgctgccagcaggcttggtacgagcttagcacttacgccggacggggtcgctgtgaataccagatccgcacgactcgcaatttcagccggatctacaccgtcgagtggcctgtgaatcacgcccgtcaaatgcggaaatccatctgcgatggactcaccactgctcgatgatgagatcaccgatgtgatttcaaccagcggatggttctggaaaaaacgaatcagctccaccccgccgtagccggtggaaccgacgattgctacttttaatttgttattcactctcgctcccccaatctcgatgtatgcgctacttgtgctatgtccttgcctgaaggatacttgaacacagcaattccgtcgcttatatgcatatttgtgtattattatacgactctggttatataaatacaacactctatcatcaatttcacatggattttcatccaatccgaacatatctttttttctcatccgggacgaataggtatacatctgttaaaatacgtattagtaggaaacattacaatcagggtctcattcataactaacctgctaccaaggacatatgaatagattcatgatggtcattatgagacgtgggggactatagtgcatatcgaatccattttacttattgtactccttggcctgaatattatttttgcggcagcagtcgttttcttcgaacggaaggatgccagcgcttcatgggcttggctgctcgtcttgaactttattccggtgtttgggtttttactttatcttttaaccggtcagaacctgacccgataccggcttttccagtggaaggaacgtaagaagctcgggctagaggaacgtattgaagcccagctcacgcagttgcacgataaccgcacacctttccgcaaccaagcaaccgagactagccaggacatgatctatatgaacctgaagcagaacggtgctctgttaacggaagataatgcggtcgagatcattacggacggaacagataaattccagcggctcttggatgacatcgaagcggccaaggatcacgtgcacgtacaatactacatttatagaggcgaccgtctgggcaaaagaattcgagatgcacttatccgcaaagcgcgtgaaggcatcaaagttcgtttgctgtatgacgcactcggatcacggcgggtatcaaaacgctttttcaaagaattgcgcgaagcaggcggtttggttgaagtctttttcccatccaaattcagtctgatcaacttacgtatgaactaccggaaccaccggaagattgtcatcatcgatggtaacttggggtacacgggcggatttaacgttggagatgagtatctcggcttaaactcgaaattcggttactggcgtgacacacatctgcgtattcaggggaatgccgttcatgcgctgcagacccgtttcctcctggattggaatgaagcttccaaacaacacgacacaccttatgttccggcgcatttccctcatattgagggtacaggaaagattgccatgcagattgtctccagtggaccggatgcagagactgaacatatcaagaacagttatcttaagatgattaatggggccaaacaatcgattctgattcaaacgccttattttatcccggatgccagtgtattcgaagctattcgtctcgcgtgtctgtccggcatagatgttcgcatcatgattccaaataagcccgaccatgcctttgtgtattgggctacgttatcttatattggtgagttgttgaaggttggcgccaaagtatttatatatgataatggcttcattcatgccaaaacacttatcattgacagtttggttgcatccgtgggaaccgccaatattgactaccgcagtttccggttgaactttgaggttaatgcctttatgtatgatgaaacgattgcgacagcgcttgtagaaacctttgagcacgacctgcatgtatcgcgggaaatgacgctcgatgaataccaaaaacgtagtctcattatccgcttcaaagaagccatttcccgtctgctatctccgattttgtagcggtggcactccgatgacagaacatccttccgatcgctgttatccccagatttttttgattccctattctaaaggggaaaatccggggataaaggcgaacgttccacttcttcaggatatttctgtcctctccgttatgtgaaatgttaagttgcacttttaataatagaaaagcaggtacttcctctccgttatctcagaggagggtgtacctgctttttttcttaaattttcaaacttatgagcctatattggctcactcattatattttcaacccgttcacacatgttctccccgcttaaaaccttcaccgagcacttcgtgcgcgttactgataatgacaaatgctcccgggtccacagaccggatcaacgctttaagtcttggtacctcattttgcccaaccacgaccatcagtactgttcgttgatcatcggtgtaaccgcctttggcctccagctttgttaatccgcgatccaagtcatccagaatcactttgctaatcgcttcggtctggttggagataatataagccaccttggaaaagcctaggcccatctcaacggcatcgatcactttaccagtaacatacaacccaattagtgcatagagagactgttccaatgacaatacaaaagcagccataataataaccgtagcatccatgatgactacacacagcgagtaactcaatccactgtatttctgtacgattctggcaagaatgctcatgccacctgttgatcctctacctcggtatacaattccaatccctaaaccaacaccaatcccaccatacagtgaaccaagtagcggattcgttgttggaatggcccaatccttcgtgagataaactaacagtggcaggacaatactgcccaataccgagcgaacaccatactgcttgccaatgagcaggaaacccgcaatcaaaagtgggatgttaatcgcccactgggtgtatgccggctccagattgagccactccttgcctaggatcgataacccggacactccacccgaagcgatctgattcggtaataaaaataaattaaaggccactgcgattaaaaacgagcctacaatgatagataccgtatccacgacgtttctccatggaccattgagtggaatgaggctagttatcctctttttgcgattattgtgaagttgtgatcgttgttgcatgttctcgtgctctccttttatgtgactgatcagttgttcgctcatttcttctatcctataaaattattcaaaaaaaagctcccgtatacaccagcatacgcctacacgtatgggtccatacaggaacttatattaatcggtttctactttaatctggctacgcaaataaccatcgatgaatgcatcgaggtcgccgtccattactgcccctgtgtttccagtctctacgcttgtacggtgatcctttaccatactatagggatggaacacataggagcgaatctggctaccccatgaaatatccgactgatctcctcggatttcatccagctgttgtttttgctcttcaattttacgctcatacaatttcgaacgaagcatcttcatcgcccgctcacggttcttgatttgtgaacgttcattctgacacgttacaactacacctgtcggaaggtgggtaatccgcacggctgagtcggtggtattgatatgctgtccacccgcgccactcgcacggtaggtgtcaatcttgagatcctctgttcgaatgtccaattcaatcgtatcatcaatctcaggaaccacatcacatgatacgaaggaagtatgcctacggcccgatgagtcaaaaggagagatccgcaccagtcggtgtacacccttctcggctttcagataaccataagcattgtgccccttgatcgatagcgtgacgctcttgatccccgcctcatctcctggcagataatccagcacctcaaccttgaagccacgcttctcggaccaacgtgtgtacatccggagtaacatctgtccccagtcctgtgactcggtaccacctgcccccggatgaagctctagaatggcatccatcttatcatacggctggttcaggagcagctgaagttcgaactctgccaccttgctcacgatcgctgtgacgcttctaccgatctctgcagcgaggtcttcgtcgccttcctcgtcagccagttctaccatcatcaccgcatcatcataatcctgttggagtttggtgtattgatccacagatcccttcaccgcatttagctcagcgattacggattgcgccttgtcactatcatcccagaaatccggggcagacatcttcacttcgaagttgccgatcatctcttgcttcaaatctaagtcaaagagaccccctaaggtttgttagttttttgcctatttcacgcaggtcatgcttcacgtttggatcgatcatgtgcaattcctcttttcattaagataagctccccgcatccagggcattcctccagatcaagtaagtgatgcgccaccctggtgttgagactactgttatatcagtatatctcttccccgtgatcatggtcatattattataactatgcaccattaatcggttttgcatccacttcatcctatggaatacccggctgcaaggagccattcatgtcatgctatctaagttgacctcattcatgttacacctgttactccgattacagcagcatcttctgatcgctcttatccccagattttcttgattccctcttacaagggaaaaatccggggataaaggcgaacgctccgcttcttcagattgcttctgcactctccgttatggtgtaaaatcaaggttcaacttattacactatagtgtatataaaaaccatcgctctactcttgaccgtggcagtgtttgaacttcttaccactaccgcatgggcatggatcgttacgtccgatttggtcagaaaccttcactggacgtttctcagcaggttcaccgcttgtcgagatctgactttcctcaacaaccgcttgacgctcctgattgctctcgatctgtgctctcatcacataagtcgctacttcttcttggatagaagcaatcatctgatggaacatctcgaagccttcgaactggtattcacgcagtggatctgtaccgccgtaggcgcgaaggtggataccttgacgcaattgatccattgcatcaatatgatccatccacttgctgtctactgcacggagcacaacgactttttcgaactcacgaaccatctcttcgccaattcgctcttcacgtgcattgtacttgttctgaactttcgtgaacaggaactcgatgatttcttctgcttccttaccccacagatcatcttttgttatcgaaccgtcatccagcaatttgctgttcatgtaatcggcaacttcctgcagctcccagttttccgggatatcgtcaccacaatgtgcttcaacgatacgttcaatggaaggtttgatcatatccataacgatctgtttgatattctcggattccagtacctcgcggcgctgtttatatataatttcacgttgttggttcataacgtcatcatattggagaacgactttacgcacgtcaaagttgttaccttcaacacgcttctgcgccgattctactgcacgggtaatcatccggctctcaatcggttggtcttcttcaaaaccaaggcgctccatcatgttcaatacattatctgcaccgaaacgtctcatcaattcatcacccagtgacaggtagaactgtgttgaacccgggtcaccttgacgtcccgcacgaccacgcagctgattatcaatccggcgtgattcgtgacgctctgtaccgatgatatgaaggccgcctacttcagctacaccttcacccaagataatatccgtaccccgtccagccatgttggttgcaatcgttactgcacccgcttggccagctcctgagatgatctctgcttcttccgcatggtacttggcgttcagtacctggtgtttaacaccacggcgtttgagcatgtcagacaggcgctccgagttctcgatggatactgtacctaccagaatcggttggttcttactgtggcgtgccacgatctcttctacaacggcattgaacttgccatcgatgctcttgtacacgacatctgccatgtcatcccgcttgtttggacggttggttggaatttgcagtacttcgagaccgtagatttttttgaactcttcttcctcggttttcgctgtacccgtcatacccgcaagtttacggtacatccggaaatagttctggaaggtaatcgtagcaagcgtcatgctctcgttttgtacttcaatgccttctttggcttcaatcgcctggtgcaatccatcactgtaacgacgtccagacatcagacgacctgtgaattcatcaacgatcataacttcctcatcactgactacataatccacgtcacgacgcatgattgcattagctttcaagccctgcacgatgtgatggttgagagttacattggcatggtcatacaagttctcgataccaaatgctttctctgcttttgccacgcctgcctcagtcaacgctacggatttcaccttaatgtctactgtaaagtcttcttccggcaccaaacgcttcacaaaacgatctgctgcatagtacatatccgtcgacttctgagcttgtccggagataatgagtggcgtacgcgcctcatcgaccaagatggagtctacttcatcaatgatacagaagaacaatggacgttgtaccatttgctctttgtacagcaccatgttgtcacgcagatagtcaaaaccaaactcattgttcgttccgtacgtaatatcacatgcatacgcatgttgtttcaaagcatggtccataccgctcaggttaacccctaccgtcatgcccatgaattcatagatttgtcccatctcctggctatcccgttgtgccaaatagtcattgaccgtgaccacgtgtacacctttggacatcaacgcgttcagatataccggaagtgtacctaccagcgttttaccttcacccgttttcatctcggaaatacggccttcatgcagagcaataccgcccagcatctgtacatcgtagtgacgtttgcccagtacacggcgtgaagcctcacgtacggttgcaaatgcctctggaagaagttcatctgttgtttctcccttttcaatacgagcacggtattcgtctgttttacctttcagttgttcatcagacaacgcctgaaattgtggttccagtttattgatcacatcgaccgtcttcatcagacgtttaacatcacgttcattcatgtcgccgaagatctttttgacaagtcctagcatggtatacccctttcgtgcaaaacagaatagaccccctgttgccgccacgcgacaccatcggatggatattgcatccacttgcccgggggtgacaaacaatatgatttgagcttaatgaaggttacacttcgtcaactcagttgccagaatgtcctttcgatcgctgttatcccctgatttctttaaaactctcatctcagagggttaaatccggggataaaggcgaacgcttcgcttctacaggtcatttctgccctcttcgtcattcgtgtaaaaatcaaattcaaatcatatgctaataagtaatatgatgaatcaactccaggcttgccaagggttcctcatgaagctgattcggtgttcaaacggattcggttattaaaaactagccgaagcccgagccttgcgaatcatgttcatggtgctgtgcctgtcattgattatgattagcgatcattcgttgacaattcctcatcaggacaatgattctctttgcataaattgtaacagtttgtaagggccgccgcaacacgccacggcacacttctttgaacttctgagacatatcaaatggagtttaagtgcaaaaaatcatagtcgttagcggaagcgtccgattgtcatgtttcgttttgcaggatagacagctctgtcaacgaattttgatggtaaatttggatggaaatctcaatatccagttctcgaatgtaggtatacgaatattttcgtaagcatcggaatctggcagtaaacttttaaagtttgtgcttcttcttactatctattagacgcagcagcatagggaatagtttcaccattttatttccaacggtgatttcccagctcctgtacgcacaaaagagccccatccctaagggatggaagctcttgttagtctaatccaggaaactacagtccctgtcttcattattattagatattcatactcatatccgatccgatgatcctgtaagttaagattaaccttgttcgatcaatccgtacttaccatcgttccgtttgtaaacaacgctaacttcttcactgtcaatgttggagaatacgaagaaattgtgaccaaccatgttcatttggaggatggcctcttccacgtccattggtttcaacataaagcgtttcgtccgtacaacttccagatcatcgtcatccgtgtccgcatccagttcagctgtagctacagtacctgttggatcttcaacgaagagtgtcttcaggctgccttcctggcggaacttacggttaatttttgttttgtgtttgcggatctgacgttccagcttgtccaccacggagtcaatagatgcgtacatatcgtcgctctcatcctcagcgcggagcacaatgcctttcaaagggatcgtcacctctaccgtatgcaaacctctcgtcgtgctcaatgtaacagcaccgtcagagttaaggggtgcatcgaaatacttctcgagtctactcaactttttgtcgacataatccttcaaagcatcagtaacctcgatttgttgacctcgaatacttaaattcatagggcactcctcctttttcctttgccacttcattataacacgaatgtaagcgccatgtaaaaactcccggtgaccgaataatgacatctgttcaagccacatctgccaacgtaggcataacgccatatttcgcgatatttcatcatattcagccctaatcgtatatttacatggtatgtcttattaggcgcttgatgatgtatttaaccgtttttgagcttgctcaatctaatatgtaaaatgaacttcaatctatctcttaaatctcttgaatccaatagaataatgttcctcggatgattctcaaatctcgaatctattaaaacaaaaaaagaccccggaaagtaccggagtctgatgctagcgataattcaatttggtaaccatctaaccatatatgtaggtcggattgtccggatgattataatttgattacgttagctgcttgcggtccacgtgcgccttcgacgatgtcgaattctacggattgaccttcttccaaagttttgaatccttcggattgaattgcggagaaatgtacgaatacgtcgccgccatcttcagtctcaatgaaaccgtaacctttttctgcgttgaaccattttactttaccttgcatgcactaacattcccttcgtcatcaaatgaagtgaagctttcggccttaacctctgcccacaattcagataataccatccaaagttatccattgtcaattggaaaagtaaatgttttcttggaattttttgtagattaattagggtttgtgttgaaaggtgggataacttgaatatatcaggtaaatggagggttgataagtctatttttgatgtattaatgatagtacgacaaaccccatactgagtagaagccagtacggggtttcattatagttataggattcattagcactactttcgtttatccataagataactctcggaagcatactttgattcatatactgtacgctgcgttttagccgtatttcgttggagcaaccattcctgcgcttcgtttttaagtgatgacatacgttgttctattatcgtgtcgtatgccaaaacttgcttcagcacttctttttgcagatcactcatctcttgaacgtccaaaatacaatgcaattgctgcactagaagttgacgctcttcaacaaactgtactacatgatcagaatcttgagtttctaaatctttgataaaattctgcgtaagctcagaaagttggctgagaacatcgtttatcaaagtcttgttgctactattcattgagctgaagctcccattgcttgtttgcttgctacaacccaggtctcacgcagttcctgaaaatatcccagagcttcttccccatgcttgatatcttttttaatattggcttgaatcagcaaatggttcatgtactcatatagcgagaacaaatctttagagacaggataagatagattcagcgtagacattagctcgctaacaatcgtttgagctttaccgaggttctcattcgctttagaataatccttggttttaattccttccaagcccatttttgtaaatcgaattgcaccatcatacaacataataaccagttgccctggagtggatgtttgaactgaagattgtttatatttgtcataaggagatgtaatcatgccaaactattcccccttttatttttattgaaaataacttgataaactggaggactgtgattggaattgactcatagctttttccattgcggcaaactgtttgtaatatcgagtctcccaaacagtcatttttctatccaagtctgaaatcctattgttataatttttcaactgctggcccatactactttctatcttcaaagtcatactagcatcagcatcctgttttgaggtaccaacttttttcaccaacatatcaagtgttgcattcaactctgttcttaacgcactaaatatgggaggattactagaatcggtggaaggacccctaaaagcacttagaattctatcaggattgctatccaacgcatttttaagtttgacttcatcaatctgtagcttacccttttcataatattgcccagtggttattcccgcctcactaagcactttcaagtttcctgtgatgacagacctcattgtagttactgccgagcttagaatagtatcattctttaaaagcccactcttggctcgctcttcccaatttttaatgtcatcttccttcatgtccttcttttgctctgcggtcagaggtgcgtaatcacgatatttctcttcagataatttagtattcattaatcctaataattcattataggtatcaacaaaagatttgattgtctcaattgcttttgtagggtccgactgcgttgtgatcttgctgggtgagcctacgtttgtttctaataaagtcaaattaacaccattaactaaaagagtatctcctttagttatatattcccgagtacctgaagaagttgtaactttcactttcccttcttcggcggcattcgattgtaaacctagcaaaacagaaaaagagctggcttgagctgtgccgtctttacccgtccctgtaatttctttcccattctctcttgaagtgatcgtcagcttgccactgatttcatcataacttgcgttagctgttgggatttcagaattaatacgagaaattacagtagacagggagtctgtatttttgaattccaacgatttattattgatatgaagttcatacttctcaggcggtgagcccgtttggtcaagctgtactaacgtagtatttaagcttgcttttccgttaggcgttcctgtagttagctcgtttgcggtttgcaaattagacttcttggcaagtttctccacttcaacattcattgttaccgaaacggcatctgcattagcttcagctctgactgctgtggtatttccgctaacggtagatttttgtgtgttggttgctccagaaagattcatttgttgtaatttattacttaattggacaatcttactatttaattgtctataactatccctagtccaatccagaatttgcttttgttgatttaatttatcaagcggaactctttttactgtcattagtgatttgaccatactatcaatatccataccagaaaagccgttaatccgcatgttcatttacagtaacctcctataccttttcatcaattagtatcccggcaatttccatcattttagctaccaagtccaatgttttttccggtggaatctcacgaatcaattcaccagtttccttattcagaactttgactaagatttggtgagttttttcatgaacactcatttccaaagttgtagtaggtccctggagagcttttacagctttgtcaatcgctttaatgagatgttcatcgccagatggaatactaatcccttgctgctccagtttggaaagatccacgccgcttctcacagcctgaagaagctgttcattcttatttactgatactacacttggttgactcaaagaacttgaagtaccgttattcactgtatttgttgaaagtgagaactgtaaattcatcgttcatcccccgatggaattatttattatattatcggctaacacggttcgagattgaatagtagggatacaagataataatttatgaatctgatcaatataaacacttaaaaatttcttccaattgaatggtagatcaaaccagaatccttaattacatttttattaaatacgttgcgtccatcaattaaaagcggtattctcattttttttgaaaccattttaaggtctacatttttgaattcatcccaatccgtcaataaacacaaggcatcactgttctggacagctcctattttatctttactccaagtgatattatcatggtcatatagctctcgaaaactatccatagctacaggatcaaaaacttgtaatcgagcaccttgaactaatagttcctgaacaatctctactgctggtgactctcggacatcatcagtacctggcttaaaagaaagcccccaaacagctatcgttttcccttttaattctcccaaggattgcatcagtttttttaccacacttcttctttgtagtgaattcacttctacaactgacttgagcagtttaaaatcatattcaacatttcctgctatctgtatcaacgccttcgtgtcctttggaaaacaagaacccccataccctattccagcttttagaaaagatgtgcctatcctactatcaagacccatgccatgggcaacttcctctacatcagctccgactttctcacaaatattagctatttcattaatgaaggatatcttagtagctaaaaatgcattggatgcatacttaatcatttctgcattccgtcgatcagtgattactattggcgctttaacaaagttaaagagttggtctagcaatgctcgtgatcggttgttattgactccaataatcactctttcagggtatagagtatcctgtaaagcagtcccctcacgcaaaaactccggaattgaaacgacatcaaaacgaccagagtagcgttcttgaattatattttcgacttcatcattcgttcctacaggcacagtactttttacgactactaatttatattctgtaatcaattgaccgatttctttagcaacttgatatacgtaatctaaattcgcttctcccgaatcaagtggtggagtgccaacggcaattactatcacatcagctgtcgatattgctttaaaagtatctattgtaaaattaagtttattattcgatagattttgacaaatcaattcttttaagtttggttcatagatcggcacttcaccttggcaaagcataccaatcttgacttcatccttatccaagcaagtcacattatgaccagaatcagcaaaacacacagctgtaaccagtcctacgtatcctgctccaacaacggtaatcctcatgataacttctccccatcgcttcatgtctattggttacttcatgagtcaaattcttgaagtacagcccccaatgcaaattctatcactttatccatatcgtaatagctgtactgtccgagcctcccaccaaatattacattaacttcactttcagctaatttattatacttttgatatattgtattatttcgctcatcattaatcgggtaatatggttcatctcccagtttccacggaactgagtattctttagtgactatggtatccgactgctctccgaactcaaagtgcttgtgctcaataatgcgagtatacggcacatcagaagatgtatagtttactacagcatttccttgatagttttccatctgcatctgaactgtttcaaacttcaggcttctatattccagctctccataacaatacttaaaataagcgtcaattggacccgtatacacaaccttggatgctataccggaattagattttataaaatcaaagtaatccacttctgtaattagatctgaccctttaagcatctttcctacaatctgagtataaccacctttaggaattccttgatatggatctttaaagtagttattgtcgtaggtaaatcttacaggtaatcgctttataataaatgctggaatatctgtgcaaggacgcccccactgcttctctgtgtagcctttaatcagtttttcgtaaatatcacgaccaactaagcgaatcgcctgctgctccagatttactggctcagtaatacctgactctttaacttgtttatcaataatctgttttgcctcaaggggtgtttttattccccacattttactaaacgtgttcatgttgaacggtaaattaaaaatttcatcattgtaaacagccatgggtgagttgatataatggttgaactcagcaaattggtttatatactcccatgtatctttgttacttgtatgaaatatatgagcaccatacacatgtacgttaatgccacttttgttctcagtataaatattccctgcaatatggctcctcttttcaatcaccaaacattttttgttacgcttagttgcttcataagcaaatactgctccaaataaaccggagccaacaattagataatcgtattttttcatctaatccccctgttcagtacttacgaagtggatatcatcttggaacttaccatcaatatattcgagtattcgttcataatcgtcaaaatagtcaatttcagaccaaaaacatcccttaacatcgatggtgtaaatatttttttcttgcgtcattgtgtacaatatttcctcccaccatcgtccatgctcttgcgaatgaatcaagtcttccattttcttgcagaacgtctcggtaaattgtttttgaatcttggcaatacctacatattcacaagttcgatcttctcttggaagatcctttccatattttttaacacaaccatttacagtctgaaaaaaataatctcccacttctacacgatctgtgtccattgccatgactacttcgtgttggtcgcttaaaattcttttgagaatttcactagagaaaaaaacgtctgcattcagtattaacatatcatcatcaatctcttgtctggcaaaccatagactcgcaatgctgttagtgacatcgtagaaaggattatgataataggtaacatcaagtccatttagcgcatttttgattaattcattctgataacccacacaaacaaaaatctccattccttgcttttgcagcatctcaacagtgtgtctaataagaggagttccattaataggcaatgtacttttaggtactgcttcaatcattctggatattctcgttcctttgcctgctgccagtaaaattgccttcataactgaatctccctctttcattatatttaagcataaatttttaagacattacatcgctgccgattcaatagaataataatcaatagtttgcttcaaaccatcaatcatactcacttcaggttgccaatttaatgcttccttcgccaagctattgtctaaccaactgtcctttatatcgccttctcttaaagaagcatggatactcttcaactcggtgttcgtgatgttcttaatcatattaaatagttcaataagcgataaaggtccattccgacttatgttcaagactctaccatctccttgtttcaacgcagctagattggcacttacaatatctcgtacataaatgaaatctctcgtttgattcccacttccgtgaaaacaaattcgttctcctctcaaagccttattaatgaaaatggaaacgacacccgcttcacctttatacgcctgccgaggaccaaacacatttccataacgcaaaatggtatattctagttgatacaactctttatacaattttatatacaactcgggggtaagtttggagattccatagaatgatttcggatctgtcgcatgcttctcgtcaatgggcagatagcttggacttccatacactgcagctgtggaagaatatataatcttcttaacatcaaactctttacaacattcaagtacattgatgcagcccgctatattagtactctgatcgtttaaaggattggccatcgatgtctcaacatcaacctgagcagcaaggtggtataccacttcaggacaaaaatccctaaacgctagatgtaaatccgaagacgtgacatccattgttatataggtagccataatattttcgtattctttttttcctgtagtatagttatctactacgcatactttatgaccgtctctaatcagagcatcaaccaaatttgatccgataaatcctgccccacccgttactagtattctcatacttccacctcactaaaagcatatgtttgcttttcatagtactaatcccagtttggccacaaatcaatccataggatcttatgttcaggaactcctcgttcaatcagtagctgttgtatactcttggcaatcttgtagtcaaggacaccaatgactagttgatcatattcaatttctcctatctccagtggatctgtgacaggtaaaccctttttccgaaattttaaatgatctttatctaaccactgtacaacacgactccccttgtagcgcttcattttgaggaataactcttgaccaagtttaccagcaccatacaatgcaattcgttcttctaataaatccaaagggaattgatctgcaagcgaatccttttttatgcctttacttatcattttcggcatacggtacatttttccgaatagtgaattatggttttttttataaaattctattctttttcggtcagatgtacttccacgtagaatggaatattccaaacttgaacctgagtaatatcgctcaaacggttctgtcgttcttgcaagaaacaattcacgtatttccttacgactcaaaataggtgcaaattcaacaactccatcttcacgaccagtaaccccatttggcatcccaccaaaaaactccattgtctcttcatttgggcattttgtaatgatttcaaaatattgaagcaagagatctaatttatacgctcggtgaggaatgatttttatcaaatcattatatttcctagtgaaatagactacaccttccatatattcattgattccatgacgaattaaagcctctctttcaccattattctcaaatacagggactactctaccatcagcttccacgtaacccgtcgtttgcccctcaggagctcgacaaaacatttctaaaattaaaccggagtgaagataactaggaagaaaactatacgtaatagaattttccatcaaattcaatcgatccattcgcaagtaaaatgttcggggtttatgaggataaaaatcactcattatctctgctaggcacccttgggtaaatcctcccccagaaaggtccacaaaagcaaactcgtcgtcatggaatttaatctcctgctgtaaataccttacaatcatgtttcgtttatcccgatggaaattaattaaatattttttaaaagggtcactttcattcagccgcttgatcaattctgatatgacaacaggagtaattttttttgtttcacttttgaatttatcgggaagataaacaagcaattcgtttactgggatctgcataacattagccaatccgttaatatcttttatgtttttgacatatgaccatcctacaaattgacacaaatcactatttttctcgctatatgatgccatacgccatgttcttctggaaccgtatatataatgtgtttggagctcgtaatcaaaatcagatataatctgatccgctatatgctttaatacatatccatctctagcaataaaatataagcgtcgtatcccttttctcaggctctcttgtagaacccaccacacataaggatataacataacccctcccaaagaagcgccgatggcagatggtcctaaaagtttattctcaaggcgtgcattccgggctgttcctatggttaactgaatggatgaatcggcctcttcagtttcaagcacctttgtttcgtatggtttcaacggttcgaatggaatgtgctctcctcgaatgcctagttttcgcgcaacttcgacatcaacatataggttatccccataatgcgtccattgaccgtaatccgtttgctctctctgacgtaccaatttatacaaattccctgtccatttagcttgcatatgctctcgggatacatacaggggaatatgcaaaaatacagggtctgctttgataagcattgcctgtattatgtcccggtccaagtacatatcggaaattaagacgacatgttcggcttgtaagtgaagcttcttaactttttggatattctccagaatacccaccgaattctcgtattctactaacctttcaagacccatcaacatccccagatgcccctctgttaaactgcccgtagttttgagagcattataaatttgaggaagcgtgatctcttcttcacgctgaatcgcagctgcagagcgggccaacctttcagcatgcaaacgcaacgagaaaaaattctctcggatatactccgaaatttctgcgtactctgtattcttcaatagcctgtcctgcataattgaaaaaataccgttaggggttgctgttgttcgggtgaggagggtatcaaacacatcgaacgtatacataatctcctccgttaaattagacttctgtcaatgagttgctttattttagttgaacttgtttccttggtatatgagaagaactccatattagatcctactaaacgtagctgctgcaggtcctcatcccagtcggccccatgatcgtctccagaaaaatgacagtcatagttgtatagcttccacgcatccatcttcacggtgttttcgaagttgacttctacaacacgatcaacatatttgttcgattcaatgatggcgaacctttcttcaaacggtatatacggagtcctggatttaaagtgaaaaactagctcatctgtaagtaccccagcaatgagaacttcacattgttccttagatctgcgcaataaattcagatgaccgacatggaagagatcaaacacaccaggaacgtacccagtgttgtattttttcatgtttttaactccttataaaatatatttaaaggctgaatttcacagaattctctataacttgattattctggttcaggtgatttagtttcctattattcttacaacctaaatattcaaaaccataacctgtttcctgaataaactccataaaagctttatattccccgtttttccaattcgggtgtgcctgtttctgcatctgcaagttaatatcgtaatactctctaatgtggagtccctgcaatacatctcccaatgtaggtttatcaaaaattatatccaaaatctcttttaaaattggtgaatacgtaaatttcgaaacacctgtattgttcagttgttgcattacatcttgttcatgcagccagcgctgttgaaatgataataaaatcttgatctgttctattgggcagacattgttccaacgaaactaccgaaacgttctcaatttggctatctaatttagtaggatcattatcaatgattttccttatatctaatcctaatttcattaatgattctacagtgatttccccaatgttcttggcacaaaatacttatatacttttagttttaagaaaggaaaagctctacaagagatacttgtaaattcgcaaatctaacataatcagttcttctacagtctttataaattaaactgtgtattgttagttcatactacatatatcgacatttgtagtattataaattagttgaaataaatagaaaacatgggacactagcttaaagtatcatcaaactgtcgggtattagcgcattaactataaaactcatctaatttgatcacttagtgtgatcaaatttccttttatttaccagaaccatcatcatcaaatgttgcgtttcaataccttaaatcttttacagaagtagcgtcctgaaattgatctgtagctacagttcctaataactgtatcactgtaggtattcgtgctcgagtcattaaaaaagatagagcttgggacaaggcaaacttattaaaagctgttgcaatgtaacaatggatctgtaacagttagaggctctcgaatctaatgttacaatttatctgcatcacattttctccaagaataaggatattatcttcacctttgaatgacacactgctatttattaatgattttggttttcccttaatggtgttgaatggaacctgatactctccaatctctttgactcaatcattggattgagacctacatgtacaaaatcactctttgaataacccaactccatcagttgatgaattattgattcgtagtggcaggctactgctatgaagatgaaataggatgcaatatctctgaggacttccttatctctaatgggtcttccctgaaagagctcaccccgcttgcttgaatccaaatccacaaaagtatcgatgggtacatgcaattcagtcaaagtctcagcaactattttccctagttttcccgatccccaaatcgctacttttttttcgattcaaactcggttttagacgttctatattaaacctgagtatatctttatccataagtcccccctactctgaaactctagccgatctttttatagcttatctcccttgtgtttcatctcgtacaatccaattcttgtcttgaacgtatattttataatggttaacattcatccgcttcaattgctcttcgatttgacgataataaacactgcatataatgatatgccgttctttgtcagtgatctttaaaatatcatcagggctcttaatttcaataccttggcgctttgttccccatttcgaagcatcattatccacaaggaatgcaggcttgtattgatcaccatgcttgttcatatagtcctgaaacattagacccgctccaaaaataataatttttttatttttactctcgccaaaaagatcaacaaacatttcattatatttttggtagggcagatctggattgaagattcccggatgatgaggtttcctctgttcaatcggaggataagtcatatagtccttacccatggacatctcaaggcaacgtttgtaaccagcaggagcaggtaattgaataccagcgaagtccagcagaatcgtttcgttgaaatcactcctgttgaatggctgataacgattataatgagtgaaaatccccagatgttcggagtttggatcttgaggttcccttgccactttattcaatgtcttagaaagaaaatcatacggaataagttttgagagcattctatacatcttccattccagtttagacagttctcgaaatttatcgtattcatcaccatatattttggcatagagcagattttgcaatttatgaatatttccgacttttttctgcaattttcgcgaatttgacgtgcaggtatccaatggaagaatatcgatccatatcccttggttccctttatggcctatgtccattaaactgattccagtagtgttgctattccgaagacgactaaatccaccatagaagctatctaaattatgatcaggagcttgaaaagcatacggttcttggaaagatgagttggctagctgccctaacttatcatagtcttctcgaggcataacaatatcaatatcatcatcccatggtataaaacccttgtgtctgactgctcccaggagagttccgtacacagcataatacttcaaattgtgctgctcacacactcgcatcaattgtttgagtaaatccaattgaactccccatattttttgcatggtttcggacacttcataacgttcggtatctttttgtctggtacctagtgtttctgcattatctttcatttttcttctatcaattcgtgtccactcataaaaatgccgatgtgtctctctttttcttacatccgttaggaaacgctcttcctcctgaagtaacaaatgccacagggttgtcagcccgtacttttctttcattgatttcagagaaacgtacttttcagcataaggagcaaaaatatacatatagtgtagtgctcgaaacattatatattttgcaggataatttaatttgacaaattcttgatcataaaatacaatcttatcgttttcataaaagctattcagtggaattaactctaaaaaagctttttctaatataattccccagtccagttctgcgttatcttcattgcataatgcattcaagtgccgcggaacttcatccgaagaagccagaatctgctcatataatcgatcaaacatacccctgaattgatctgggtctgtacgaacaatcgacttcagatagttggagagagtccgactcgttatatatggcatgataagagattcatttattctgtcgtgtgcgacaatattcaatcctctagccttcaattccatcatgttgtcgtataatcttgccgcactctgtctcccctcttcatataagggagttttcttcacagttccatgcgaatgtatcgttgtggcaaacccattttctttaccacgatcccctgagattgctgcatagatcaccgagtcaaagtccttattctggctacactctataagaaaagaattcgaaaagaactcaaaaacttgattatcaattaaatcatcataaagatcattttcatatgcaagcaaggaatcgctgttcagataatagggaattaaacgttcctgcagattcttttcaggcaaataagcttctgaatagatcaactgaggcagtttgtaatccggtaaaggatagtagaatttgtgattatcgaaaccagctaaacatacgatatctttaatctcctgacgactaaaagaatagcccttcgttccttgaggataccggttaatcccatcaaataccttaccggtatggggttcaggcgcaccactgaagtaacggactccatagcggttttcaactgccatcaagatctttccattttcattgagcatagcacgaagtttctccagataacggacatacactgtacgatcagaagaaccttttcctacaagttccatctgtcccactagaacgatataatcaaacttgcgatcaagatgaatttcgtctaagtcacctgcgtaaatatccagattagttcgatgagcatacctttttgaaatcgcctcagcgcgaaataaagaattctcaatagtcgttacttgatcacacttgtcacaaagtaatcctgtaagtgccccgaactctcccccaacttcaagaatattggcctctcttttgaaatcaaaccattgaagcagagaagtacgcagttcacttaaatggtagaatacatcccatctagtatcttcctgtaacactttagtataatcctccgaggcattctcaatataggttcgtatgtcgatatcagtctcagagaaggtcatctcaagattgccctggttaacgtactgggtgtaaagattggccatcgtattttctcctgtaattctgctatttagttactgagtaataattaagcaactgtaatctattaagaaaaacatcacaaactgtaatctcctcttcggaaatgttcatctctaataagtgctgtttcatctcttctgcatagttcatacttccaacaataaaatgtgcatctgagtaatggtctacggcatcttgcggagaagtaatcggagtggtccccagattagtgccccagatttcgctgttgttatcacagacacagcagatattgtcggtgcgtataatttcttgtatggatagtagtaactctcccatcttcgaggcaccgaagacaactaccttttgttttcttttcagaacattaatgaccgcagtataagttagactacgtttatcctcttgttctcttaatcgagataagatcagctcagaatctcctcgcaaatccttgtaaaactccatcatctgagtagataaacctgcttctataatcgcatcgcttaaattagattgcagttcttcacggatcgactccaagaataacaaacggctagagttagataatcgctcaagattccaccagtaggatgttagccttcttaatgacagcgccacaaagacatcttctgatacattcgcttgggactgaagcttctcttgaattcttttaaattcttcaatgataatatgacttttaccatcatccttggtagacgagcctgcattgttggttctataccaatagaatggtttattcaaataatatgctctagtcgcatgaattgccgttaaaaaactaaatcctgtgtcttgatatgaagcacctggcgtttcgtttaagctaatactatatttttgcaggaagcttcgattatacaagccagtccagattccaatgattgcacgcatcgataaaagaggattctcagcaatattaattaccttattatacaatgtatgctctgcaaggatgttcaccttggtattaaattcgccctctggtgtttgtatgaaagcttgtatatctgattgcacaaagtctgcctggtgctgttctgcacattcaaataaacgctcaaacatatcgtgttcaatcttgtcgtcagactccacaatcccaatgtatttcccttgagcctctgcgatccctctgttaattttgtgaccataactcccattaggatcattaatgattcgtatcctatcatcattagaagcataaccttgcagtatttccaatgtgcgatcaatactattatcatcaatacataaaaactcaatttccttcatacgttgtgcaactacagattccatgcattctcttagataagcctcagaattatgcaccggtatgataacactaacctttttcataacttcccccttttcatttttgcttatcactaaagaaatatcacatttttaaaatttaattgcagcaatctctctcgaacacttgcttggtgtttggaagcaacggctacaagcactagcacttcctctcgttcatcgattaaattttgaatctcaattacgcgatgtcccataataaaattcggattacttcctttttccgttacaacaaaggcatgtatacccagttcatttctatccaatacttctaaaacccatctcccaattgcacctgctccgtaaataaccaaattttcggattttttaataaagggaagttgctgtttgagcgaaaccaattgcactccaactggatctacatgcttctgaaataaatggaactgcttaataatgcggtgatcacaatgtgaagcagtcacaagatcaacaatttcaatctctccagcgattaaataatagagttccacgattcttttgtatattctaaagatatgcgtagaaatccaataattctcttcttcattacagtgttttttttcccaggaggttatcatctcgcagtatgttatgaaataacccaatacatttttcttcgaaaatgcactagtcatgattgagctcgcacgcatacgacgtataaaatatttttttctcaaacacatcaatcgctctgtccctaaaatagctaaaaatgtaaataactcgtcctcatgtagtataccctcgtaaaacttaagctgattcttctcaatgtaagttctgctccaaaattgacggcaaacacttgataaccaatcccaattttggattagtttacaatatatttctgaccctgtgtgtacaccattataatcgtgtttgaactcttcagtataacctgcaaactccgacttcagatcttctgtttcaaatactacactggcttcaaatataacaacatcaagttttccttcttcggcacagttatagagttcttccatagcattaaggacgatcatatcatcggagtctaaaaaataaatgtattgtcctctagcagcttctataccttgattccttacgctcgacaacccctgattctcagcattgtcaatgatttctattcttcgatccatatgtctatataattctagtatttccaaagaacgatcgtttgaacagtcatttacacatataatctgtatctcctgcagagtttgatttataacactatccaagcactgctcgagatattggtcaacattataaacggggatgataatcgtaactttagggaaattcatatttttcacacacactcctttcctaaaaagttcatttcagattaaaccagaatttctcttccttcagaaagtccaaaaagtctaaactctctgtatacaattgggtgaatattattaaactcatgtaattttaaatgattaataatttcagtctgaaggctttctttagttgctaaaataacgaggatccgatctctttcatttataaaatcatcaattcctcgcacatttatatcctctacatacttaggatggctctccatctcggtgaccacaaaacaacaatcatttctcctgtgcatataatgaagataatcagctactcttctacctacgtagccagccccatatataactattttatcgtatgacttaattatattattaaagtgttcttctttgtccttaataaaatccataaattcacttaacttattagaatctaaaggatagtttttaagagcgctcgtacactccttagttaaaatagtttgatcaacaacattagataccttgtccagtaactctacaacttctaattctttttgttttaaatacttaaagattgctggataaagatcatctgtaataatgctcaaagacatttcatggagttgacgcaactcgttttctttagacaacgccatcaggtctatagctgctttcatacagtccttggtccgttttagattaagactggtaaatttgtgacccttacggtatcgataagccgttctacttattgcatagaacttcttagctttaatcattgcttttgcaacaaataccaaatcttctcccctactatactctggaaaaaaaacatgatgttcttttaaaaattccgtgtggtagatatatcgatgaaacccgtaaggaaattgataatcagtaaactctctaatttgatctccagtgaaagtatactttccaaatacgccaagaaaattgtcggttatttgattatcattaaaataactgaatgatccgccacatataaaaacatcgttatttttagcattataatataaatcttccaatacttgattatcagggtagaagtcatcagggtccataaaagcgatgaactctcctcttgcaaattgtatgcctcgatttcttgttaacccaaccccttgattcttttggtccaatacatatatatttccgttctcggcttcataacttcgtagtattcctaatgaatgatccgttgaaccgtcattgatacatataatctcaatgtttttaagtgtttgcgataaaacactattaagtgattcctccaaatattcagcaacattgaataccggtataataacgcttattttaggcccactcatatttcaaacctccccaaaagaacacttatttatataaaagacctaatattcacaaattctaactcttttaatttctcgtaaatctctggctgatatttcggagatgcaccgataagcactaaagcatcttttttatatacagttaagtccttaatgtctactacaggatgtcccataatataagaagaggtgttaacagctctatctgagacggcgaagcagtataatggtttgccattttggttcagtagttccagcacttcttttgcgataacaccggccccataaataataattttcgaaaagttctcagcgttcatgagcacaatgtcatcttttaatgcgtttgactgtttagctattccgatattagaaggtgccgttaacatataaaaaatcagtttctctcctgatgtaagcggcaatgttttttcaatttccgtaatatataacttttcattgatttttttattcagttcttttaaacgattagctagtttattaacatgaattgcgatggcctcgttaacctctccaccacaatttttatcttcccaaaatgccaggacctgaacataacatataaataaaccgatgaagttccttttagatatttctgttgttgtaatcgaatttgaccttatccgtctgataaaatatggttttttcacgcataaagtacatttcgcattcaaaactgctacaacagtgaataattcgtcctcgtgaacaattgattcgaaaaatttcaagtcgttttccacaagatactctcttctccaaaattgacggcaaacgcttgatacccaatccctgttctgaacccattgaataaacaggttctctcctgatgtgacttgtgaatagtccccattaaattctcctgaatacgaatgaaaccgtttcttcaggtcattactttcaaagagtaactgtgcctcaaaagaaacaaagtctgtctccttttcttcggcttttttatacagatcttccatagcatttgccacaattaaatcatccgaatccagaaagtagacatatttacctcgagcatgtgttagcccttgattgcgtactttggataaaccaccattcaacgagttattaataatagtaacccgtttatccttattcgcatattcagtcagaatatccaaagattgatctgaggatgcatcattcacacatatgatttcaacctcttgaagagtctggtgaataacgctctccaaacagtctacaagataggattcgacattatatactggaatgataatggataccttcgggccatcattcgtgggcatgtcctttttcttccttcctcattgatcaatataatcaataaacttcaatttcttggttcgatgataacccaaacaattgaaattcttgtacatttaaagggtatatatgatcaaattccaaattctctaatatctctgtaatttctttatgcaatttagtaaatgtggttatgataaccagactattagacttatactcagttaattcttgaatgattcgaacaggaacaccctgaacttctgttgggtttattgttccctccgaaacagcaaaatacgaaataccgatcccgcttacttgttgtaaatatttcgctactttaattcctacatttcctgcaccatatagtataatttcattaaatacatttatatagttcaagaattctttttctttctctttaattttttcaatatattcatttatattatttatttttaaaacgtagctctcttctatattcccttcattttctgaaaaacactttggatctaaagcattattgatttgttgagctactgagcgcaattcctcgttaccttcagcaacatgcttatataaagcagggtacaagttgtcagcacttgtttttatggtcagctcatgcaatttagatagtccatactttttggaaatgtccaacagctctataacacctttagcccagtctcttgtcttagcagctgtgagaacaacggctttatgtccaactcgataacaataagatacttttctcattgcataaaattcattagcagctaccatagcatttacaaaaaagggggggtcttgaaacctaataaaaggagggaattcaattttgttttttttcaaaaaatccaaattatagatatacttctgaaatgccgaatgaaactgatattcgcggtaattcatttttctgtcggtcttgaagatgtaatctcgtctccagccagcgtagttcgatgtgatttccccatctttataatgactataagagcctccgcaaatcagcacctcgtgttctttggctttaagatatagactctccaaaacgtctgtttcaggataaaaatcatccgggtccataaaagcaacaaattcacccttagcaatattcattccattattacgagccttaccaacaccttgattctcctgattgattaaaacgattttatcatgagaatctgcgtatttactcaggatacttaatgattgatccgtagaaccatcattaatacagatcacctcaatatcactcaaagtttgagataatacactatttaggcattcctccagatactcctccacattatagactggaatgattacagaaatttttattttagtgttttgtttcatagaatatccctttcttcattacgtggagtacatccgttccaactctttaatttgagttctaatattaaagcctctctgcgtcaccaaatgatctgcttttttacgttcatatccatctgtacatcgcagaatatactccatccacttacctacctccagaggaatatattctacattgggcgtgaccttagcttctcgagtaatcgtgtcactagaaacacaccttattcctgaagcttgggcttcaattaaaacaataggtagcccttcgaagcgagaaggcaacacgaacagatccatggcctgcaataaaccattcacatcatctcgtttccccataaacatgactttatctgttaggccatattgcagaatcctttcctgaatccccttttccatctcccccgttccgatcagcagtagtctagcattagtaacttggcgtgaaacttcgtggaacatatcaactaggaattcatgatttttttgataagcaaatcgacctgtatgtccaataacaaaacaatcttcgagtccaagttgaagtctatacctgtctctttgatctgtatcataagaaaagtcttctacatctatagcattattcatgatttttatacgatctctcggtatgtgttctccatacaaccaatctgctgccaattcagaacaagcccaaaaatcggttgcaagcttagtgttaaactgctctctacggagattatgcattttcaatgcttcttctctttgatttttatcagacattccgatcattgtattatgtgaatgtacgattattttgggtactccatgctttatcgcaagttcttccacaataaaacttctccaaaagttggtgtgaagatgtatgacatcgtatccttcactcaatattatttccatttcattgataaattgtgtttcattctcttccgcataacaggagatataatgaatcttgcaaccttgacgctctatttcttccccaaaatcaagtgttttgctcaatgtaacaaaatcaaaatgaaaaacgtccttatcaataaactcccaattcttcaaaacatactgagtgacgccaccctgcacattccctattgaaaattgtagtaccttgatttttttattcatataattatccattctaacacctcatcaagattaactaattaattttcatattgccatctagaccccataatttttctcgtcctagccacaaagttggtaatgaccgcatctatatcatgacgcaagactctacgtaggcatttcggacactatagacatttaattaaacaccttgcttcttgcattcctcaataattccaggacacttcaagttattgcaggaaggtgaagaaagttcacaccgctttgcttacttggaaggtcaatgatatcgtcagtataaaggaaccccgcctgacagtatgatgctatctgtttcgctttaagcaccgagtaatgattaaaggtcgagtaaatcactcgatccgacatacccatttctttagcaattttaacatttttttctattatttcacagaatatagttcctgttttgaactctacattcacaaccaagcctgaatgttttagtagtcatatccttcctccaaggtcggtatcgttacctcaccatactttggaaaggatttattataattaaactttcggaattcttgaagtgtaaaaccctttacccaacctgacgaatttctgagccgctccagtgtttcatcatggattactacaacttctttatcctttggagtatagtgatacaatccagattgctccactcccaatccaagaacacttgattcactactttaaatccaaatctttcagataatttcacgacatcctttgaagatacattggctctccattgaacattctcatgaaaattctcacttacactaagagatgtatccccttcaaaagcattcaagttggaatgatgaataaagcaatatccgtcaccttttagaattctgctaaattcactcaagtagatatcaagcattttataattgaagtgaaccattgcatcccaagagtagataaaatctagactttcatcttggatgggtaagctctcaggttcgctttgaacaaaatccagatgtgagtcaccagcaaatctttgtttgcagaaatcaagagcattgctagagatatcacacaaaatcatgctgttgtaattgtcttttagatgagctgctattctgcctctaccacaagcaaaatccatcacattccatgacgaattgagcaaatcatacttttgtaacagcggcattatgatattttgaatttgtttcgccgcactaccttcagcattaatataatagttatcccaatctcgacccgttgataccgccggtatgagaaactcattattatacggcacgataatttttttctgtggtaccaacattttatcttttaaaaaagcttccatcaccgaagtgaatttttcagtagctaacacaatatagtcaaaattgagtcttctaatatcgcttgggtttaacacttgaatttgattatcgatttgcggcttgtccttatatcttcggtccacacaagcctcaatgtgacaatatgatagtgtctgtacttgtctaatgaagctctcgcccgtgtctccagcaccataaataataattctgctatctttctcaacttgatgaaatggaaataaactaaatttcattatgtttaatgtcccttcgagtcaatttttcgtttaaaaatatctctaaaatatttgccatttcaataacttcatgatgttcggaagaggtccgtctcgcctctttaatacttgaaatggcatcagcaaacgtattaagtccatatcgtagcccatcttcactgaactcttctttgtatacttgattttgagaagtatcttcaaagcaaacttcgaattctgttgttttccaccaaggggcatttaccttgatatatccttgggtacctgaaattaataactggccttcagatttgactccaagccccgtcttggcagttgctatgccacctttatatttaaaataggctttcgtgtaaatatctactccattgtcgtcgaagaacgtttcaaagcgcatatcttggtactctgtccccataattcgcataattgcaaacagtggatagctccctaactcagtaaaacttccactgaagtctcctgccatcatctccctagttgctggatctgctagtttagtgaatcctgcttctacatctcggacttggccgatttcgccacttcgcaaaatattcataactttaagaaatccaggacagaatgctgttttaataccctccataagaacacaatttttgcttttggcaagtgcaaatgcctgttcagcttcgctctttttcaataccatcggtttctcacaccatacatgaatcccatgctgaagggcacgaataatatacccatagtgggtttcatgtggtgaagcaatatacacagcatcaacttgattgaaaagttcctctgcacttttagctgtaatctctaagttatgcctgagtgcaaaagcatctgcacttgtatagcgaggattgtacacacccaccacttttagctcttttacatgtttcacttcaggtatgaagcgctcggcgatacgccctgtaccaatgactcccattctaattggaaaatgtatctcctgcaccattctattcgctctcctctagcaaagtgatcgctgataccgggtggacttttcgctggctttcagggggtaattccttataatctccaaatttaaacgttagataatcgttatattcttggataccacagaacgagagaccttcaaacgtaatatttgcactattctcataccattttcgataataaccatacgccttattcggtgttggaaacattaaaatgcgtaccatttctgtaacttgcttattgcttctccgaatcattttatgataataagaaaaaactattttatctgggattttattcaaaatactaaacagtattcgcatcaacttttgttgatctgatactctgccaactgctgaccataatattttgcgaacgcaaaagcattcaaaattgtgcaacgctctcaaagggtaagtatctgggacaccatctaatgggaaaatatcaataaacaccccttgctcataaggcatatgttcttgatgcttccttaaaaataacgtctccttacgacggagcttaccataaccccaacgatagccaggtgtattccgatgatcttgaaaataaaatcgttccgtatccaattcagtcaaacaagcttcatgaaatttttcatattcaggtcgtagcagtgcaacatctgcatcatcatcccatggaatataacctccatggcgaactgctcccagaagagtacctgcaataatgttataacgaattccacactttctacaaattcgatcaacctccacaagcatttcaagttgaatgagctgcagttgtcttaacgattgcttgtccagttggatcactgttacctcctgtaatgcattaatattaaaccaaacgtttattctttactcataaacaattcttctgtcctctccagcaccaaatctcaccaattcaattcgtttctcatgaggaattacgatcatgctatcccataaatcctgagtaaccgcatctcttgttctctcagcgacattcactccaggcggtctatattctgtgaaatactcaagttttgcacaaccaatggatacaatagggaactctctttcttcatagatcgcatcagcgtggttgtgtccatgaatgagtgaaataatcttcttcccacttttcctttggaagctttccagcaatgaaacaaggttctcgccatttcttatatcttcactccaatagtgcaaagctcccagcggcggcacatggctgaatatgagatatgagaaaccttcatctgcactttgcaatatatcctggagccaatccaattgttcaagcgaataaccgtaacgttccttctcctcgtatgcaaatgaatttaagaagatcattctaatcaacaaatctttgttatctacataatagaacgttctatcttttctacgatgaatatacttttcactatggttaaggtaaagtgcagattgttctttttccgtcattggagcagaattgttttggaaataattagcgtcgtgattacccggaacaacgtaaagaggaatttcattttccaacaaatctccaattactttgcgtgaataatagcttgtcatctttggagacagaagcccgtctgtgagatcgcccagatgaacaattgcgtcaaagcctactttctcatgaactgaccgaatgttataagcagtgtcttcccaagtaccattaacggtatagtgactatcggttagaatggctatttttagcgaactatcagtgcttctttccaaaatggaattagctgtgatgtccacttcttctataaaatagggcttaacttgatgttccaagtcttcgctatggtaagaaaggatattgtttatgttatctgcctcttcctgactgagacccttcccatccacacgttttaaacaaaccctgaaataacagttttcttgaaacatgtatttctcctgccgatatgtggtaccattcaaatccatattatacgtagtccagctggactcaggttcatacgcatacgtatacacatattttagatcatattttagagaatacgtcgcaatattaaagtagtagttatggtcattaagctccacaacacttcctacaaaggctctgtaaaattgcaatgatgacattcgatcaggttgatcataaccgttccttccagtcgaagcatagattgttacaccaggctccacttccaattggactttcttcattcaattgataccctttcctgtagttgttgttgtatggcatagtgtaccttctcgccacaagtgccgtcgatattgtttataatttcagcgtacgctcgtatttgtgatttcttattttcatccttgtcatttagaacatagtccagaaattgatctatacttctatactgccgatcttctctacagttgtatggtaacccatgatagaatcccccgaatgcccgttcaatagcgagatcagacatactttttgtttgtacaacatccaagcgacatggaatactaaaacattgttcttttgcaaaatcaaatacacacagttggtcatcaaatgcggaaagagctactacttggttctcattaatttttttcgcaaaatagtagttacttttataaaaataacctgatgattttctactcccttctttataaggagggttccattggaactcactcatctggccagaagcaatatcgattttgacaatcatattcgaagtccttgggaaggccagcataaaatctccacaacatataatattcacaaatagaagggaatcgcctgcaaaaccagcaggataatccttgtactcccatgtttcacctgtttcgtaattccaacgaatgatggatgtactcttattcggaatcaaccaataattacgtccgtcgaattccattccaaagtaatttgagccttcaggcccaacacggtacattcttgatttacctgtgtccatgtcgaactcaagaacctgattcactttggatgaggctagtaagagcaagttgtccttcacactcactccccacccgatcatttcttcttctgcatgttgttgagcttctttaaatggataaatacattctgaatgatatgttatttctccactacgggtatcatattgaacgatcgccgaataggccttcggcacaaaaaaaagataatgtttatagggaatcattcgagaaaaattgaggtgatacaaactatgatcaaatgtgatttgtttaaagacccttcttgttacttcatactcaacgatagtagaaccattcaaaggctgcatatacacacggttccctactttatgaatgtcacagtatgcaaaactattcactggagctgggagcatatccacaatgtgaaacttacctgtacttacatccaactgacataatgcctggtaacctgcatctacaaaccaaatgaaattatcctcacaataacaatctaggaaatgtagggatgatttctcctcttccgatggaagttgactgatgtctggattcgtcaggaacgaaggtttgccggtaattccgaacaagtgaacaattgaggaggattcttcacctagataagcgtctgaaaaggcaattgatttcgtaacatcaggtgtagtatcaagaatacctattttaccattgataaagatccgttcgatctgctcataaagactaagtaggtcaggtctcatactatgcagtgtcgatttagttaaaggatgtggacgccagagcaacaacacatcttttcttcgagagaaacactcaaaagtgtatagcatcttttgcaatgctttcatcccatgttgcaagatagacgagatactcgtattatacatcacaacttttttggtactcgccatattttcccactcgataggaaaagcaggtttgttctcttccatcccaagcatacgatcggcttttggggatcctagcggcagtattttgtcataccactgggtattgataaaatgttccttcacacgttcagattgaaggatgattttgtccacatgaggataagccataagatttaattgcccctctgggaaatttcctccagtaaaaaagtaaggtacgtagacaagcatatccgtatgattctttagttcacttgcaaagtaattttcttttacagatgttataaaattaccattgtcatacgggttagaaatgtatatgatatctggatgcttagaagggatgttatacattgaatagtgtgtaatatgaacatattctggaaataattctccttcgtataggagtttccccaaacttcgatctccattacgttcataatacggaatggggatgacatgtaccgtacaatatggatcttccttcgctatactccatatactttctaacgaatcccacattgaagctttatatggaagaaagacaacctcatagtgacctctgtcttcacttttggatgaatctacatcccgtctttgtccactaaaactgttcatattattatttttcgctgtctgtaaactatgttccatatcaacctctccatctcttcatgcaatctaccaaaaagaacaccatgttaatattatcggtgcattccaacaaaacttaaagaaaaacacgtccaaaacaaaaaaaacaaatactggaaatatcgaagactctgatcacaaaaaaagcatcttctagcctcctcttttcaaagggaccagaagatgccaaatatttaagtcatttcgtacatttgtacaaaatttccgactcagccaaaccatgaaacatcatttgtttctcattaaattctaagctaagtttcacttcatccacattaaatccggattgctttattctcgaagtataatctcttccatatttgcgtacatgatcatgctgtccataaaacttatagcgcagttcaggagtattatactcttccttctctaatgtgaattcaagctcattatagattggagcattgatataagcaagaccttcagatttcaatactctcttcaattctttaagcgcctgttgttcttcagtaatgtgttctattacatgactacaaataattagatcaaactgatcattttcataaggaatttgagtaatatccacaacatcccggataccagggaaacctggatcgaaatcgacgggataataatcaatatttttatttgcactaaataagtcgaagtataccttttccggcgcaaagtgcaatatagataatccttttaatccctctaaagctccatactctcgttcaaggcttatatacagagccctatgtctttctaatgattgacacacagggcactttgcgttggatcttaatggatctccaaatggagtatacagcctgatcttactcttacatatggggcactgttttttctctaagatgacagaatcgtatatatcctcaatcatcgtttctagcttcattagtctacgcatcaattgtagttggatttcatccatgacaacttccccctcaagaccttatctaataatttaacaaatactacgcaggtctaacccaagagaccacaggaaaccgttgagaaatttctttttcaatctgatcaactgcctgcgcatcattaaccgtcttatataatttataacttctctcataagtaccataacttgaatcaagaagcattaacttagaataaaacaattgcgcatcttccaaataattattcctaaagcaaagatcccctagcaaacgaatgacttcgacattattggagttcgttttaaacatttcaattaacatatcaatagccagttcatcgaatttaaaatcgctaaggattgtactaagcttcatcttatacttcatatcgtactcgatcagtttctcagcaagattttggaacaactcaaactcttctaaaataatcaactttctgcaaagctccaggaacattttatccaatgtgctgctacgcggacctgataattgctgattatttaataattgcttgatgatttttacttccttttgccctaggttcattgtgaattggatgccatctaacaaatcatcgtcttttaagacataactaagaataaaaatatcctgtccaatttcattcttaatattgtcaacctcatttaaaattctcttcgcctcttcatagtgtttgctgtatacttcagcaacaactctgatatgcgcttgagcatttattttgtgtgttttcaaatagaacgctagtaatggatgccggagtccataaagagtattcatcaaattttgaagtttatgaatactatcaattttataaaattcttcaatattcgacttaatctcttccaaagattgatttatcttcatagtgagctccaaataatcatgcaatacttggatagaatcacccttgatttccatcgcctttaatctctcagtataacttttatctaactcaccgtctgattcataaagctcagccaattgaaggtgagccatataactcccactaccctcagtaatcaccgagccttgatctcccatgactagacacttgagaaaacattcttcagcatccttgtaataacccgcttttatatagatcagcccttgtatatacttcatttcagtttcttgtggataaagaaccgtcgcatcctttaaaatagcgagaccttcttctgcttgcccaaattcagaaagcgcatatgccaacttggtcaagagctctggaagaaacaccttatcttgactctttggaaaagcaagtttgaaataatcaattgatttcttatactcctctataccgaagtaagtttttcccatgttaaagaggttgtaaggagttggcttctctttcacttcaagctccatcaagggtaagttccggttatatttcttctcttcaagcaacgtttcgtcggcataaccagcatgataaattaaacaatccgaaaccccgctaatatatttagtatcggtctctatgatattaagatgctcatgtagtcggttctcataatataagttaatatgatttctgaagagtctgacagctgtatgattaaaagatcttcccatagtcatttgattattaatattaaatacataataatcataatttttaatcaaatctttttgtatattagtaccttcttccaagtgttcatccgcatccaatactaagatatattccgatgtggcatatttaatagattcatttctggcagctgaaaagtcattcacccatttaaatgaatagattttctcggtatatttacgtgcaattgaaatggtagaatctgtagatcctgtatcaataatgataatctcatccactattccttgcacacttgtcaagcaacgttctatacatttttcttcgttcttaacgatcatgcataatgaaatagacttcgtcattttatcctctcgtctcttaagtagtattactttatatgtcggaaaacacagacttttttattagtatttagaagaagattgattaatccaattattatcttatttggagtataaaaaaaggctgtcggtatataccgacagcctttttttatacaatttgaaattaacgaagcaattgcagaacagcttgtggctgttgatttgcttgtgccaacatggcttgggaagcttgagccaagatgttgtttttcgtttggttcatcatttctttagccatgtctacatcacgaatacgggattctgcagcagataggttctcagaagttgtacccaagttattgattgtgtgttccaaacggttttggtaagcacccagcttagcacgctctgttgaaaccgtttcaattgctgtattgattgttgtgatagcagcattcgcagaagcttgggaagagatgctgatacctgtagttacagttgctgcagtacctcctgttgctgaagcagatcctgttgctccacctacagccaagctagctgcatccatagcattaatttcaagcgtaatgttttgacctgcgttagcaccaatatggaacgtcaagttagcagcaccagtaacacctgaacctgttgcagcagaaccatcaagaagctttttagtattgaactcagttgtattcgagatacgagtgatctctttagccaattcgtcaacttcactttgaagtgctgtacgatctgtatctgtatttgtgtcattggaagattgaacagccaactcacgcatacgttgcaggatggagtgagtttcattcaatgcaccctcagctgtttggatcaaggaaatgctatcttgagagttcttagtagccatatccaaaccgcggatttgaccgcgcattttttcggaaattgccaaacctgcagcatcgtcaccagcgcggttgatacgcagaccggaagacaatttttcgatagccttgtttgtgttagttgtgtttgcacccagttgacggtgagtgttcattgcagcaatattgtggttgataatcattagaaatttcctccctgaaaataagttagttccacatccttgtggtaaacgccgcgacattaaggtcggccgccctgccgaagcagcgtctaaactatatatcgacaggaagagaagaactgttaatagtaaaatggaatatttttatttttttttgttttcaatgccttgaagcagctccataaaagcagcaacactaggagcatcgggttttgcagactctcgattagcctcctgaatagatgcatatacctctttccggaagatatcaatgtgcttgggggcagagataccaatccgtactgtatcaccttccactgccaatacagttacctcaatattatcttgaatgataatagattctccctttttacgtgacaatactaacatttcagaccccctccttcgccgaagtcgcttcttctgtccatatgagatgtttagtcatataacctgtttgctgaaggacaacttgcttgcctacccgatgtgcaggattaattataactggggccaagagattcatcgttgattttttcacatctgaatgtatagtgactatagaataaacggctacatcttcttcgattttgagttcttctttatcttcttcactcagttcaaaactataatcctgcttaaactcaaaaggactgactaccaagaaagagagctctttctccgttaatgattgtaagtaactaaatggtgtgtcttcccaagggattagtgcaaaactagtttcgttttcaaaaccaggtagaccccttggaaattgatatgtgctgttttcatctacttcaatttttccccatgtacttgtctcaataaaaataataaacgcctccttggcgatgattttatagaaaaaagctatagcggggtattataaccgtctatagctctacattatatattataatcccatatcaatcgtaggcggagtgtattgtatagaagcatattgctgcacataaatatccaacttaccacgttgatattcaatctctggcttgttcacaattacattcatctcggattccgctgcttcaaagcgaatgtctggtgcttgcgtaaacacacgtacatccacattatcagaggaagctgccgaacgtgtctcaggaaacggtttagcttgccaatttgttcctacaatattggcaattgtattgcctggtttgtggatggctgccatatcattcccttgttgcacacgttcagccatattctgcatgaataattgctgaatacccgaatatattcgggcattcatatcaatcatattcccaccatgataggcagaaaaagccttggactgatccacattcagctctattgcatggctttgcaccgttaatttactaggcttggtatggagttggacctccgccttcggctgacgaatcgaatactgaccaatgtccgcatcgatatgtaatagcgtgggcgttgtgtgtatttgtaccactggaagagtattcatcagatgatctctcctttactatctaagaaaatcaactaatgactgggatataattttagcaccagcagaaagtgaagcattatatatgttttcttggattttagacttgattgataactcagcgtaatctgcatcctcaacctttgcttgcaaatccgttaagttcacttcaagatcacttaatcgaccttgcatgagttcgacgcgattggttttcgccccgatttctgcacgaatcccgagcatcttgtttgttcgagtatcaatgtttgcaagctgatttgagacttctttttgatctccactggcaagagcctgactaatcgaattaaagattacaaatagattatcggcttccgtagaatcaccaaacacctcattaccggttacgttaattggtaattggatactctcacccacgataaaattaattttacccgaatcagtaacgacggaagcagcattagttgtatcgaacgaaccgtcagcactggtaggaaagtcataaggtttcacatcgtaggtttcaccattaaatacatacttcccattcaatgtgctgtttgaaatatcaacaagttgtgcttttaattgtttcacttcttcattgatactatctagtgcagattgcgggttagtccccgtagctgcctgcaccgtcagttctctcaaccgctgaaccacgctgcctgcttgatccataacggtatcattaaaatccaaccatgataccgcgctatccacatttttttgatactgctcattggaagaaagttctccacgataacgaagggagtacgtaatccctaccggatcgtcagacggtttgttgatcttccgtcccgtcgccaattgagtttgtgtactattcatctgttgtgcattacggttcaagttaagaatcaattgcgagctcaacatattattcgtaattctcatcgtctgttatgtcactcctttctattatctgcctactacgccggtagagttaattaatttttcgagcaattggtcatatgtggtcataaaacgtgcagaagcactataagcatgctgaaatttaatcatgttggccatctcttcatccaaggaaacaccactgaccgattgacggcgagtgtccacttgttctacgagaaactcagaattggacgtttgacgtgccgcttcctgagattgaactcccaactgtccaacgattgcactaaactgagcaccaatcgttgcattcctcaatccatcaacggatttcattggagtatccttcaaattagccagcagattagccagtgtattgttacctttaattactgtttccgcccctgaagaatcggtagttgtgcgcaaagaggttgcgatcttatttggatcagctagaatcgccgcatttaaagaaatatttcctgctgtgatcgctgtcccaccaccagatgctgtgaagaagggtaaacccggtgacgaagttccgtccatgctgtatccgagttgatgcaaaccgttcagacccttgaccgtaactttcagatcagttgcaagcgtccgtgccgcacccgtgtatgtaacaccatccagaacagtattatctggcaagacagaacccgcaggaagggtgatctcaatatccccattggcaagtgtattagctaagtcgtccatttgcttctgataatcagtcaccaaagtgtctctggacttaatcatgccgtggacctcgccgttggttagcgtgcctgctgtatatgcagcattcagaaaagcaggatcaaccgcgacttgtaccgccccgccagtgacgagtgcctgtccattcatctgaacctgatatccttgcggagaatccgtaacggtaacgttcatgattttggacagcttgtctgtcatcagatcacgttggtcacgtaaatcgttggcattgtcgccaagagactcgacttttacaatggcactattaaggttcgctatgttaccgaggtagccctgaatttcattgcttttcacagcaatgttactatcaagatcctcgctaagtgcatccagttgacggctaatctgattcatcgcatcggtcagagccaacgtcgtttcttttacgatccgccgtgctgtgacatcctcaggatttttactcagatctgaccatgatttgtagaaattatccataacggttcgaaaaccagtgtttgatggttcatttacaatagcttcaagtttctcaagagtatctcgttgaatggaccaactcccgaagttggtattttcattgcgatactggtcatccagaaatttctcacgcacacgtgtaatggagtcaaattctacccctgtaccgagctgtcctggtgttgtactatgcagaaatgcgaacggctccattggaatagatgcctgcatgtttaccttttggcgtgagtagccttccgtgttggcattggctatgttatggcctgttgtgctaagagctgtcgtctgtgtgaacaaactgcgtttagccgtttcgattgaatgaaatgtagatgtcacctggtttccccctaattaatcaggcacgcgtgtcaaacagaccgattcgccctggattaccgttcttatcagcaggatgctgatatgtggcatcctgttctggtcgagaagcaaagatgtccatagataagtcaataaacatcagcgattgctcgatcaacttttgattcagttgattaatttcttttaattcctgcagtgttcccgccagctttttctggacttcaagcaatcgcagtttgtcagccggatcaaaaatcagctttgagatctcagtaatgttcaggttcagcatagatttgattccacgctcctgtagcagttcgtgtactgcactctgccgttcgatctccaatggctcctgttgtttcatgaaacgagattctttgttgaggagggcaatgagttcatctacatcatttttgacaataacctgtctcttgacctcactgagtgccagcatatcgcggtgactttgttccatttgctgcaaaactacaatcaatctgtccagtgctgccattacgtgatcacctattccttatcaaaagacttaaaatacggcagcagcttgtcagcaagcttgctactatctacctgatatgttcccgaactcacctgttctttgagttcctgtatccgttgtatgcgtcctgcatcctgtgtacgactttgttcctcaagcatcttcatcgcctccggagaaatggatacctcgtccttacggcggctcttcttggcatcagcctgctgattggattcaacgttcctttgatatgaattgatggcgccaattctactcggttcattgattttcatttaaaatgcacttccttccatgattaggagtttatgttgatatacgtttttcttacttcaatctttatgttgtcaaaatgattaggataataaaaaaaaccgataatctttaataagtttatcggtacgtttcaaaacatttgttatagcaaaacatgtatttgagccctcgctcctattaatcgcgtagtttgtcgacagcattgtaggttcgtccgcctaaattgttgttatccttctgacctacttcacgagctgctcctgccaagtctttcgttaaacgattacgacaggagtcgcacatatgaccttcacgaatcaatgttccgcatacttcacaaggatacatcatattcggggcattctcgatggaaattcgtccctcacggatgaacttggtaatgtttttaattgaaacttctgttgcatcagatagttcctgtatgttggtacccttgttttcgcgcaaataatctacacagatctgatattccttctctatttccttaatacagtttgaacatacatctcgaaaattcaacgcatataatttaccacagcgaggacagttacctagattcatcgctaaaacgcccctctcaaacttccatttccgaatagataataactatacattaccttattttctctgatgaagccatagtctatttgcaaaacaaaagaggggaacaggatgcacatatacgcaatcctgctccccattatatatcactaattcaatgttctaatacttagtacagatgaccatgcacttgtgttctgatcgttgaatgcccgaatacgatatttatgcgaactggacggtaacagatcagaatgaataaatgttgcatcactgacagtcgccacaatttgcccatcggcttcaatttcgtaagacgaagcacctatagccgcgtcccatgtcagaataacgtttgttctgtccgaagttcccttcagcacaggtgtagttaattgagtcattcccgctataatttcactccaagctcctgcaccagaaacatttttagcacgaatccggaaagtatgctccgtatttggtgcaagtccactcttcgtataagcaactccactcacggcaaccaccgtaccatcaatctccagatcatacccggtagctccggtaacagcaccccatctcagcgcgatagccgctgttgttgctgagttaatacttaaacctgagacactggcaggtaacgtagtttgggacaatattgctgtccatgcactaacattagtgtcggtcagggcacgaatacgatatttatgaatcgttccaccaagtaccccattatggacatacaagagatcacttactgtagcaatcactatgccatctgcctcaatctcatattttgttgcaccaacaacttcattccatgtcagcgtaactgcggtttcttcaggtacagctttcagcgttgttggtacatttaattgggtcgaggcggttacaatttcactccagctaccgacgccggcagtatttttggcacgaatacggaatgtatgatctgtattggccagaagtgctgttttggtataagccaaagcggttacagcgactattttaccgtcaatttccagatcatatcctgttgctcccgtaactccattccacttcatagcaatggctactgttgttgcagaattcatactcaatccggtcacaatgcccgggaaagtgttttgagtcaagaccgtagaccaagcgctactgttcttatccgttaatgcacgcacacgataggtgtgcgatattcctgcaagcaaattactatgaacatatgagggatcggttactgtagaaacaattgttccatctgcctcaatttcatatttagttgcatctttaatatcaagccaattcaaagtaatagctgtttcctctgatgttgctttcagagcaggtgtgtttaactgggttgtaacatctgttacatctccccaagctccagccccagcagtatttttggaacgaatacggaatgtatgatccgtattcgcgataagtcccgttttggtgtaaaccactccactaacaggtaccaccgtaccatcaatttcaaggtcatatcccgtcgctcctgagactgcgttccacttcagagcaacagctgtgttcgttacacttgttaccgttagcccggtcacagaaccaggcaacgtattttgtgtcaagaccgcagtccaagctccaacattggtttcggtcagagcgcgtacgcggtatttatgtgctgttccagctatcagattattgtgagtataagtaggcaccttaacagtacccactaagactccgtccgcttcaatctcatatttggttgcatctttaacttcaggccatgtcaaggtgaccgcttgttcctcagaagaagcctttagcaccggtgtgttaagtaaagttgtgccatctacaatctcactccatatacttgcacctgctgtatttttagaacgaatacggaacgtgtgatccgtatttgtcacaagcccactcttcgtataagctactcccgttaccggtacaactgtaccatcgatctcaagatcgtatcctgttgctcccgttactgccgtccattttaaggcaatggctacgttcgtagttgaactaacagttaatcctgtcactgaagcaggtatagtgctctgtgtcaggattgctgtccacgcacttgtattggtatccgttaacgcacgaatacgatatttatgggctgttcctgaaagcagtgttgtatgagtaaagctaggttcccctactgttgctactactgctccatcggcttcaatctcatacttcgttgcgtctgctacctcagcccacgtgaggttgattgcagtttcttccgatgatgcttttagtaaaggtgtgtttaggagcgtcgttccattgatgagttcactccacgctcctacaccagctgcatttttcgagcgaacacggaaggtatggtctgtgttggctgccagagcgctcttcgtataggctactccctttactgggacaaccgttccatcaatctccagatcatatcccgttgctcccgtcacagctgtccatttcaaggcaatggctacattcgtagccgagctaacagttaagcctgtcacggaagcagggatggtgctttgcgtcaggattgctgtccatgcactcgtattggtctccgtcaacgctcgaatacgatacttgtgcgccgttcctggtagcaatgctacatggctgtagttaggttcttctacttttgccactactgctccgtctgcctcaatctcatacttggttgcgtctgttacatcagcccacgtgaggttgactgcggtttcttctgatgatgcttttaataccggtgtatttagaagtgtggttccactaattaaatcgctccatgcccctacaccagcggcatttttcgagcgaacacggaaagtatgatctgtgttggctgctagagcgctcttcgtataggctactcccgttaccgggacaacgctaccgtcgatctccagatcatatcctgtcgctcctataactgctgtccacttcaaggcaatggttgcattcgtagccgtgctaactgttaatccggtaactgaagcagggatggtgctttgtgtcaggattgctgtccatgcactcgtattggtctccgtcaacgctcgaatacgatacttgtgcgccgttcctggtaacaatgatgtgtgactgtagctaggctcttctactgttgcaaccactgctccgtctgcctcaatctcatacttggttgcgtctgctacatcagcccatgtcagattgattgcagtttcttctgatgttgctttcaagacaggtgtgttcaactgcgttattccgctgatcagatcactccatgcccctgcaccagcggcattctttgagcgaatacggaaggtatgatctgtatttgctgcgagaccattcttcgtgtaggttactcctgttacagggacaactgttccatcgatctcgagatcataacctgtggctccggttactgctgtccatttcacagttacagctgcattggtcgctgcactgaccaccaatccattaacggaatcaggcaacgtattctgtgatttcactgccgaccatgcgctaatgttattgtcacttatagctcgtacacgatacttatgggccgttccaggtttgagccctgtgtgcatatagattgaatctgatatatctccaacgacaacgccatccgtctcaacttcatatgacgttgcaccatcaactggtgaccagatgagaacaacttcttcttgtgaagggttggactgaataacgggtgtactcatctgggtgattcctgtagttacatcactccagcttcctgcaccaccagcatttttaggtctgattctaaaggtatactctgtattggctgtaagtccagttttactatatgtggtgccggttacagcaacattagtgccatcaatctccaaatcatatccggtagcaccctttactgcagtccaagctacggttagtttattaaatgtagcatcagtaaccttcaacccgtcggcacggtcaggtactgttaactgactcaccaatttactccacgtgctctcattattagatgagaaagcttttagcacataagtatgcgttgaattcgcttctaggccttcatgcacatatgaggtgaagttcccgagttcaattggcgtccccccatcaatctgtagctggtaccgatctgcaaattcaaccgccttccactgtaccgtattcttgctttcttctgaggttacggtcagaacgggtttctcaagcaaggttgtgattgcaaccggctcactccactcactagcccctagttggttaactccacgtactctataggtatatgtagtattgggtataagtgatgaacttgtataattaattccgtaaaaaggccctttgactacgccattctcttcaatctcatattggacagcttgtggagcagaagaccaattgagattaatagctacatcattggcatcagtcattaaattagttggaacagctggaaccgtagtaataggctgtgttggccccggctcttttacaaaactgaatgattccgctttccgtatgtaatacggattcaggttagatacaaaatcgactaccgctcctgtatctgcgttaattacgagacttagctgtgttgcctcgtagctttgcacatatcttggcgtagtcattccaaactcatcaacggtggaatttttccatactccaacattggttccggattgtctgtattccatagtcgtgtaatactcccatacctcagcaaagtcgacgataaaggcattggtaactttgccggtatacgtagatgtgtaggagccaaatgaaatcttggttatgtctccaactgccccattgatcgattgacttctcctaaaagaatatcctgatgttgaaatctcgtatgatctcgcccaactcagattaactgatttttgattcacctgtaattggccgttgttgttggtcaacacatattggtaatcattacttgatgagactatcccgcttcctactgctgcatgtgcccggttccccccgtacacgccaaactgtccgaataccagcatgaatactagtagacggacagtccataagtaaaatccattttttctttttcctgcgaccacttttgttctccccttcaacagatatgttgtgccactccctatgctgtcacctgtggtgaacggcaaaactatctattctgcgcgagaaaaccaattcctcttttttacatgtaaaaaatttcttattacgctttcatttataatttcatcaaacaactatatttcaaacggtaaaaatggaatggagacacgcattaacgtaccaatgattaataaaggacatactctcctgtctgctattaatatgaatgtttagattccccacctagagtggctaagaatactggaccgtcatttattatttagattcagcttctaggatcttgccagtgtcagtgtgtaaatctcgacgggaatctccattctgaagccagcatttagaataccccgcccacaagcgtccaacgtgctccctgttgtgtatatatcatcaatcagcagtatctgtatgggtttggcatgtgacatgcccttttgtgttggcagatgagatcccctgtatagctcttcaattagatgcataccatccgggttgatggaaaaagcgttcttcatcgtttcaatacgctcaccgcgtgatttgaagctttgtttggtggtgttgatctggcgctgcaacagatccacgatgggtaggcggcaggcggtggcgagcccagcagccagccgctccgcctgattgaagccacgctcggccaggcgctcgccgctcaccgggacataggtgaccgcgtcaggccgccattgtggcttcgtttgttgagcatgtgtggcgggatgagccacgggggctgggggttcttttgccaaagcagaattctgctcctcactcatcgcttgaaaggcatgaatcaacaaagcggttaagagcggtgcgtagcgttcatggcctctgaatttgtacatgcctatccattctttcataagagtgttgtattgtacggcgctgcgattggagataaaagaacggttttgcatgtgtggacgagcacagtccgggcatccgacatcccgaccacaacgcagacagcggatagaacgaatccatggaatctgcttcacacaacgtaggcatatgcctggatagatagaagacagaatcgctcgagtcccacatgtcagacaagtcgctcccggcggggcgagcaggtggtggagacgttgggtcaggtgttgcgcctgatcggatatgttactgagccaattgaacatagggggcatacctccagtctcgggaatgtattgtgacatgtggatacgaacatggcagatggcaattaggtttgggatggtggatgcaggtaacctttgcgacgagcgatggtgttcatttttcgaatctgggcaacggccttcacctgtgaacgtgtccgacgagatgatgcaaaaactactctacctgccgggtcatccatggaacgcccagctctgcctgccatctgaaccagtgatgcttcatcaaagagaccattgtctgcatccaatataaaaacatcactgcgcggaatggtcacgccacgctccagaattgtggtggttacgagcagacgaatgtcacgatcacgaaaggctgtaactttgctagcgcgatcggggtcttgggatgaagttccttcgatatggattccgggaaaagtacggcgcatcaggttcacaaacgcctcaatctgggcaatgcgtgtcacaaagacaaatacctgggcgtcacgcttcaatgaaatttggatgttagtcctcaaggcagaaggaagatttcgtttcttaatacattcagcaacggtaaccatcttgaccaagcgcgggacaggcaaaggatgacggtgaaaacgtaccgggaccttggcatgggcgagcacccccttcgccgcttccttctgcagccgagctggcggtgtagcagatagatagacaaaattcccctccggtttacaggatgatgccgccgcgtgagcgagcatgggatcgttgtgataagggaacgcatcaagttcgtcgatgataacgagatcaaatccctgataaaaacgcatcagttgatgtgtggtcgcaagcgtgagttgagcgtctttccagcgttcgtcactgcctccgtaaagggtagcgagcgaggtgtccggaaaagctttggccagacgtggtgccagctccagtaccacatccctgcgcggcgtagcgaccagtgctcgtccgccacgatccaatgtatgttggagcagggggaatatcatctcggtcttgccggccccggtcacggcccacagcaagaaccgccccggcccatcccctgcgggtgggccggccaaaaacgcaagcgccgcggctgctgccgcgctctgcgctgcgctaagcccccaccgggcgagcccgccgctggtggggcccaaagccgtgccacgcggtgcatcgccgcgtcgtggcaccgccccttgcgctgcactgcgtagcagcagcgcacaagcacggctgcgccccagcgcgaggcaagcctcgcagtaggcgcacgccgccaggccgcaggcagcgcagggcacgcgctgcctggcttcgctgccacagcggtggcagcggggcgcgctccgcgcgcgtccaagccacgcgtgccgacggcgcgtggcaggcccttcgagggcggctgtgatactcagccgcccgtgcaagcgcgcgagctgcgcagccgcgcgccactcctttggcagctgggcggtatccgccagcaacgcctccgcctcggccgccagtaattggcggccgctgatccactcagccagcagggccgcgtcccgctccagctgagcccactgcacggcgggatacggctctggcatcccgcctaccaacgcaccacgcgcagcggccctccccgctttgcccgctataacttttctcgcctcaacttcccccgaggcgagctcatatacatccagcttccgtgcaagatagttctgccattcgcgctggccccactgatccatacctcgctccatctcataatgttcaaccaaccaggatgcctgacttaacggtaacgccttgtctaacagcaaccagcgcagcacatgtcgcccacttcctccctccagccaccaagccacatccactcgaatatcgagtgataacaacatgctccacccttcccctacacggcacacatacaaagcaaccttcatttactctcctcccccatcgtactttctcctaaacgcaaaaaaagcacatgccaacccggctgttcgccggagcatgtgcttcatgtccatattccatcttcttatgattaatctacttatcactataccaattgaatctcgactctacaaattcagtcattcaaaaagtttatttcccaactcgaattaaaggttgctgatcaagtgctgaacaacttctaaccagactattatatatatatcatttagatgaaccttactctacgatgtatgtttacttcaatcatattggtctgaaatgtccaggaaccagttatgtattacttagtttggagatgcctgagaacattcgattatatcgattaatcaactcatctaaaatctcggattgcttaattacgattggatgttgtaaaccataaatcgcaaccaacgcgtgcaaactttcccgttcacgttccaagtcactttcctgattgttcacaacatatttcatagcatcctcacctctatgaaatagtgtaaccccttatgtaaaaaccaagattcatgtcagatatacaaaaaacctataagaaaatgaaatgtggccattctctcacaggtaactctctataatctataaaataagatctaccaaccaccttgaccatgagaattagtcgtcaaaatttctggaacttcaggtggtacattctccgtagcagaagacgtgttaaatggtaccaccattgttgtaatggtaattatggtagcaatgattatgaattttatcttcatctctcttttcgaacctccttcagcagtgtagtgtacttatgaagctcttcgtttgttgctaaatgccgaatggaatcaaatgtacagaaccctctgaccatacaagcatcattattaattctagctgagattgccaaactatccagtataaattgaatcccaacccgaatccggtctgagtttagataataatccgctacatctgccaagaaattcacgaactgatcatctataatctgattggtataagaccccaccttctcatgtgtgatcataaatgatgatattgtggtcttaaagcgctccaacacatgatccatattcatattataatttagtgctgccttaataagcttaaataacccacgtagaatctcattttcttttgtagataaataatccacatactcatctaaaatctcaattcttcctgccattatttcaaagaggtacctatttgctgttgcccactcccgaaactgactctttgtaagctccgcctcaagatcattctcaataatccattcgtgattttcatagcatgagacatagtataacgcctgctgatattcattcttttctccatatattgatgctatgatcaaatccgagtataaaatataaccaaacaaaggtttggaaggctcctgataactcttcccccttctaatccgttgctgtttgattttgtactgcaccctcgccagtttgcccattcgtgttgccagttgttccgctttgtcccaacgacgcaatgagaggtatagattcatcagatctttcagcgcatccagttgatccaactcattaaggcgcacgacatacggatcaaattgcacagcacattccagattattctgctgatcatcattaatcgagagcttgaatattcgatactgacagatcgccaatctttcggcatgctggtaccgttccccttcacacactttacgatatataattagcgcagctgccgcgctcccttcggcattaaatgattcggcacaatcaaacaaaggtttgatatacgaaggattttccatcattagatctactgttctttcaatacaatcgtttttcccaagctctgcacagcgagtgataaacggacgcagtcgtctccagttcattgtaaaatcatcaaacaactcactcacatactgttcataaaaatatccttcttccaaccccatatattctgtcataatatccaggatttttaccgatataggctgtgaaccattaatcactctacttagcgttccagagttaatgcctgatttctctgcaaaatgataaagaaggattttgttttcctctatgtaatgtaaaaattctgttcggatcgtcttatctattacactcaagaagatacccccttccagaaacacacttttctcacgtccaacatccattttaagtaattatatggtttaatataccattggtcaatataatggaagagtctgctttcattttatgggctgatctatcccctctagtacactcacaccaattctgctaataaccagaatctttctataaaattgcgaaactttttccaatctgaatcgtctatacttttaaattaagagttctgacttcgaaaagtttattttaatactcatgaactcgtcaaaacccagacaataaccatagattgcataaaaacccatttttaatttaaaagcagacttggctacaattacaaaaaaagactacagcttctgctgtaatcttttcactgtagatctgcgaaatgttaatcccatttcccgttcacatgatgatttactgctctgactcacgcaaatcaatcaggcgaaacgtgtgatcggtctgtgctaccggttcaatatcagcagggacagcaggcagataagatgtctccatgccttgcctttgcataagcttttcaataatcgtaatcgtttccgcttctgtacgatcagcaacaacggttaatctgaagctcttaccacggtataataattcccggcaaagttctcttacaatgccttcgatccgccctgcctgattggaagggatgagcaggatctgctcgaaaccttcagattccggacgggaaagatggcgctggtgcatggcatgaacggccattgccgccaggaagtatatgagcagaatcatagtcagatgagcaaccatggcaactgcacctcctcggaaggtcatgctcacccatggcgaacatccctgtatacaacaagtatatgctgtacttcctgaagggttacacttgcatttcctatcactcatattccacgctgatcgacaccggacgaagaaagacaggccaggtcattcattcacgcctaagcttgaacatatgttccgcacaaccttacactttgctcatttgcagtgataaagtccattaacccgcagaccaatccaacattctggaaagggcgcgagtgaacaccaatctatacttcatctaggttgaatcaaccaatggactgacttaccgtaagaatactgcttcacgaaaaacataaggtattagagcgtaacccaaccatatttgatcgaattgataacagcttgcgtacggtcgtccacttccatcttctgcagaatactgctgacatggttttttactgttttttcactgatgaacaggaattcaccaatcattttgttgctcttaccttctgccatcaagcgaagcacttcagcctcacgacgtgtaagcgggttattgtcgccagcaacaaatttaacacctgcttccttcgaagctccttcactcattgcccctgtttcattaagatacgtcatacgacgcagctgcatgatcagtttgcctgttactttcgggtgtatgaacgcatgtccttcatgcacggaacgaatcgcattgatcagagactcggcctccatatccttcagcaagtatccgttagcccctttacgaagcgtctcaaatacataactttcatcatcatgaatggacaagataatcactttgacatcagggaacagctcacgcaatttctccgttgcttcaaccccattttcgattggcatgttgatatccatcaatacgatatcaggtttatcctgattgcagaattcgagcacttgaattccatcgccgcattcgccgatgacctcaatgtcgtcctccatatttaaaatgcgtttcagtccctcacggaacagctgatgatcatcagccaaaagaactttaatcgatgctttaccagtatcacggttttccatcatcctgctactcctttcccttatccacgtttgtcgggatatgaatcactattttggttccttgattttctccggattcaatctctattcttccttctaacagttcaacccgttctctcatcccaatcagaccgaagtgggtatgatccttgcttttcttcgcaagaagctccggtttgaacccaagcccattgtcctgaacgacaattttgacgagctgagcctggtatgtaatttccactacaacatatgtgggataagcatgctttgcagcattcgacagaccttcctgcacgaggcggtagattgcagcctccatggctgaagataaacgatgttccttacctcttgtttcaaaaagcgaccggattttcgtttttacctcaaaatcctgcacgtacttccgaagcgttggaatcagtcccagatcatccagtgccataggacgcagattgaaaataacttttctcatttcttcaagactggaacgaacctggcctttcaaatctactatttcggcctggaccatcttaaaatcctgcttaatgagcattctttctacaatttccgtcctaagcactagattggcgagcatctgggcaggcccgtcatgaatttcacgagcaatacgtttccgctcttcttcctgggccaaaattattttcaaaccaatcatttgtcgatttttggcattttcaatgatccgggtcacttgacccagttcacctgacaggtattcgagtacaacacccatctgcgaaccgatggtctcggcacgctccacagaagcttccacatttttggcacgcttctgtaggtcatcccgacgggccttcagatacatttccttctcacgataaatcatcagatccagctgcagctgtgttgctttctcatatgcctgcttgatatcatgctcggaataacggacaaagtcgcggctaacctcagtcagccggatccgggaacggcggtagttcagctccaactgatctactttctcgatcgtttccgccgtctccttcaacaccgacttcaactcctcgttgagcgttttcagctcatcgcgagtcgagtccatgatttcgaacatttgatatttgctgttttccatgacttgtatggcgtttttaatgacgcggtctatggcatcggcttgtaaatccacgtttgttcgactccatttctatcgtttccggtatatatcataccatatcacgatgagatggtaacggtcttcgttttctgttcccattttacagtgagaccaagttgctcggaaacgagtctgagcgggactaaagtcctaccacccgttacgtatggtgcaacagttgcgctctgtcttttaccattcagaatgaattctttctgccctacaaccagatcaatcagcttgccaccacgtaataccgtgatccgctgatttttgctatcccagcctgcctgaccaccaaaagcgtccaaaacatgtttgattggcacatacgttgtaccatttttcaggaccggtgctgcatcaatggcttttttcgttccattcaccgtcatcgacttctgtccaagcacaagtgaggcagtccccgtaggcaatccaacttcactggacttggaaggcatcgtgaatgcgatgttgtcaaaagcaaccgtacctgatttcgcacgctcatcctgaccttcctccacgttcaccacatagacccgcttcagcttcgccggataggcgatgttcagtccgttcaggtccacactcagcttcttccacccgttccagtcaattgccttggcgagatcggcatataccgttttgccattggcatccgtaaattcggcacgtaaccagttcaggcttttatctcccataacatccatcgacatcgatgtagctgcagcagatacctctctaccggtagagccattcagttgtgcataagcgtacattttgcctgttccagcagtcatatcataaccgagttgcagtacattggagccagctttttcaccagttcctgctgtaacggttgccgtaccagttacacccgctgcgttcgttgtgaagttaatcggataattcacgttctcgaagttctcccagatcgtttcgctggcagaagccgagagtacaacgaccgtgctgtaaccatcataacgaccaaccgcatatcctacttgtgcaccagaattgacagaagatacggttaattggtcagcagtgactttacctttgaacccgataaattcccatgtcagcgagtctgccggaaccgtcacactttgtccgctcttcgttgttgccgttacaggaatcgacatcgttgtgcccgctttgagcgaacctagacctgatcctgctgtcagggaagccagttcacttccacccagtaccgatactttaatggaagatgaggctccgttgctcgttgccgtcagcgttgccgtgcctggcttcacacctttgatcgttccgttgctgacactcacgatgccgttgttgctggatttccaggacatgctgatatcgcctgttgcgatcgggttgtagtaggtgtcatatcctttggctgtgtacttgccctcttgccccaccagcaacgtttggctgccactcacggcaaagcccttcagtttacctacaggagccgtagagaacacacctagcgtgtttacaacctgacgttgctcggtgccatactctgtgttgaacgtcagaccagcggtctgctcacccaacggacgtgttaccattgttgtggagccgcctccatccaggttcatgcctttccagacacccacactggtcataaaggattgcagttccgtcagcgacatcccgctgctgttactgtttttctccgctgcgatgatgtagacataccgaccatcctgggagtatcctactgccgttcttgcacgaatgccaccaatgccggaagatgcgatatcacgggaaaatgaagctgccttgccaccgtttaccaaaatggtgtgaccgccaatcatcatctccaggttgcttggatcgaccgattgtccggttgttttggcttttaacttgtaatccgcatccaaggtttgcccaacggatagatggctcatgatccatgtcgccgctgttccatgcgcacgcaaaatgtacccatcctgcggcaccgtcatgtttagcgcttttttatccgagatttgggtgattactccgttctgcacgagaacctctgttggcgttgtggaaggatcatttggtcgtttgctcgatgtccatgccggtgtataaatatacatcgagttggcatgactatacttcaccgcacccgactctaccgtataatcctctttatttatcccacgcaaagcaaaggttgaaccatcctgtgccttcacagttccgtcaaaagaatactcgtcgatcatcggtttgccatccttggtcaccgtgagggcatacatgcccgacagttcggaaggtgtggagaccagcacgccatcggagacctgtccaccaatcggcgcgagctcgccggatacattgaagtaatcgccatttacagcagctactgcaccattttccttggccatggcacctgtgctctgtttactgttcaaattaccgcccttgcctgtcattacatccagcttcacatacgggttctgcagatccacctggactacatccgccagtacgttgaccttggaaccggaacgtgttgttgtatatctgtatttcatgagcttcgcacccgaagtcagaatttcttcactcaacttgcttgtattggtagatgctgcagcggccaccgattgccacgaagtgcctgaccacatctgcccacctgcgctcatcaccggtgcaatccagatcacacccgccagcgtcacaatcgcccatttcttcaccttactgcccttaacgtcttccagctgtttctcatgtttccccagcatgtctgaaacgtctctcccatcttgtatatcaatcttagacatcacgaacactgccaaataggcagccgatagcgagatctctagtatactcttctattaatagactgctttttgtggaaaaagttacgtttgtcccctatattagcatgcattcattatgaaaatagcacactttcatatctcggatgtaatattccattcattcatatgttggtcaatataaaaagaaacacatcagcctgagtaaatccctgatgtgctccttcgttggtataaataacctcatgagttgtggaatacatttccgcaaaagttgaagtcattatttttatagataaccgatttgattcaacatccgttttaacattacagctgcctgttctctggtcgctctatccaaaggcttgaattcattattattcgtcccttgaatcagacctgtctgtactgccttggcaacaagatcttgagatttaatctttttatgatctttgaatttggccaaggtatttgctgcaggcaattgaagagttggtgactgccccgtgtaattcattgctttaactaacataattgccatttgttcacgggtaatcagattgttcggctggaacttcccattaccaacgccctgaataattcccgcctcgactgcagcaccaatatatccattcgttatgctgttcttgcctagatcactgaattgtgcagcagccgcgtttcttttcagacctaaccctttcgcaacaagttcagcaaactccgcacgggtgattttactttttgtattgtatttcgcaagattatccgctgtaataatccatttagaagctaattccgttacagcatcacgtgcccaatccggtgtactcgggaagctaaccagatgtgtgatcggcgcgacaacctgattaccattgagcattcctcgtgccacaatccctgttgatgtagttctatatgcagttgggatgtacgataatgactgtgaattgggatcaatcgctgtcaaacttgttagtgtagtagacgtattgccaggaagtttgattgaatactggcttctaatattttgctccacacttttccctgtatttccgttaaagagtgtaatataagcctctgttgcatcccccagactctgagcattggatctggataacatgtaatccatagcacctgaagatagtctcggaacagtttccatctgtacatataatgttgccgtacctggagccgtggtgattcctgcactttgccccatagacgtcaatttcaaatcagctagaggcacactccatatactgtctttatatttgaccccaatcgtacccgtgcgataccttgaagcgatttgggatagcttatggaatggaattccaacgtatgctgtttcattacttgctggcacctcgaacaatataggttggtttaatttataacttgcagaagcgtattcgaatgcttgtccaagcttggtctcatcgatcgtatactgctgcgttgtacgattattatgtgatggggtactcttggcagaagctacatccgtactcatgaccagaagtccttgaccaaatccagaatcagccgcactccactcggtcagccacgctggacgccctactgctgtagtatctgtgggattagtaattgtgctctcctgaagtgttaacggaccgaacgcccctacctcagaattcagcgcatctctaagcgacactgttccaggtgtgtaggtaaccgtacccgtctgtccaggcggtaccgattcggacagtttcaaggtaaccactgatcctgtcaccgaggcagaattcaccggaatggtcttacttccaatcagtactttgaattgagcaggtgttaataacggctctgtttttaacgcgtttcggaaattaatccgtattgtgtcaccttgtaaaacacctgacaagatcgttccgttcccataagtatgcgtcacaggaacaagatccagcagagctgcttgattaccaactaagtctgtcagacgataagcccctggaacataagaaagggttacgatctgtgtacttgttacgggtgaagcaagcgttagtgtcacaagattgtcctcgatgtctacattgttaacaaatacggctttaccatctaccaatacggaatactgattgttcaaaggtttgttcaatcgacttaatggctcattatagtagatccatagtttattgctgctgatctcagctttctggaattcaggcggcttcgtatcattgttattgcgcacataaaacccactgaaaccagcaagtgcctgaccccgactatctttaacaggctgttcacccggttgataggatacacggacaacttcaccattagatattgaacgactgagattcaatgtaacaagtgaactgttattagtcgacatactgctgacacccacaactgatccatctgcagtaacactgaattgtttatatgcatcacttgagttaatatacacggtctcaggataatagagattaattgtatttgtatacgctataccatcacgtggcttggacatgattgaatctagaccattctccacgtctctggcagagaatgccggcgctgcattaagtgatagatcctgaattttgcgtatcccagttgcaggtgtataagcgattctcaccacctgccctactgctactcccgtatcgagtacaacatacacactatcacctgacacgtaggatgagcttacattccgattctcaccattaaccgtaactgcaaaacttgatgataacggatcaagggttgaaagtaactcgtcatacgtcaagcgtatgatcgtattactgtacatttttactgtcttaagtacaggggcggttgtatcaacagacaacgtcctgaaggtccatgccgtagctccattcaatccagtgaacagatttccggatctatctcgaaatacattagcaggaatatcaatcgtatacgttgtgttactcgtcaaactcgtttgcggaatgatgcgcaactgacggttgttggaactgttaataatggtcgttgccgtaaccgttccaccattaatatttttaagtgtggcttgccctgaataattagtgtccaattctttgttgaacgttagggtcaactcacctgacagcgccacacctgttgccccgtttgttggagacatggaggccacagttaatgctgtagggtcagagaacacagtaaatccccagtcactacgctgtatagccctgctgtcattcccgttggcatcacgtaaaaaaccttctggtacaactatgtatatcgtgctgttattcgcccaatttttagcgggatcaaccgtaactgttgtttgggttgagttaaaactgatctgtgaagaactggcatcaacctcttcgaataacgtattcccttgataaatctgtagcttgccattacctctcgacatcgcttgatcataggtaagcaggatattggcagacggcgctacacctgtagccgcattaacgggagatcgacctacgaatcgagcggcactgggccctgcggtatgaaatacccactccctatttaagcctacaaagggttgattattctcataggcaaaagattgactgccaatagcaacatagaagctaccgcctggcaaagctgaagctggtctaatctctaccaatttccctaggtttgcattaacatcgatatcgtctggtctgaccgttaccgcggaactattcacttcaatctctgtaacaatggagctatcagatattcgacgaatggtaattttatctgtagtaccctcaaccttctttactgggttattgaattcaattttgagtgatacagaaccatccacctgagtagcgtttaacagaggaatcgtggcactaatccctttcccagccaactcgtctgctgcatatgcaggttccatacctacccaaccggtcaaccagccttgtgcaactaacatcacaaccataagactaaccaatcccttacgggccatttttttcacaaacacccaaccttccccctcatctcattttcctaattgtctgatatacagacctctatatttatgtcggtcagagagagattttcaattaataaaatggaaatgtatggttttttattttgtaaaaagatgcaaaaagcccctgattccacatcggaatcaagggcttcatttgatgatccacatacatttagctaattacagacctgcttgagttttcaaaagatctactttatcaacttgttcccaaggtacatccagatctgtacggccgaagtgaccataagcagccgtttgtttgtagattgggcgacgcagatccagcatacgaataatgccagccggacgaagatcaaagttgttacgcacaagctcaaccaatttctcttcgctgactttgccagttccgtatgtatccacgttgatcgataccgggttggctacaccaatcgcgtaagcgagctggatttcaactttgtctgcaagacctgcagctacaaggtttttcgctacgtaacgtgccgcatatgctgcggagcggtctacttttgttggatctttaccagagaacgcaccaccgccgtgacgtgcataaccgccgtaggtatctacgatgattttacgtccagtaaggcctgcatctccctgaggtccgccaataacgaagcgtcctgttgggttgatgaaatatttagtctgctcatccagcaatccagctggaacaacaggcaagattacatgttctttgatatctttttggatctgctccagcgtagtctcttcagcgtgctgagtagacacaacgattgtatccacacgtaccggtttgtcaccgtcgtattcaatcgttacttgcgttttaccatccggacgaagatattccaatgtaccgttcttacgcacttccgccagacgacgcgcgatacggtgggacagagcgattggcaaaggcatgagttcaggtgtttcgttcgttgcaaaaccgaacatcaaaccttggtcacctgcaccaatgttttctgtttcacgagcgacttgttccgggtcacggttctcaagcgctgcgttaacgccttgggcgatatcagcggactgctcattcagagaagtcagaactgcacaagtgttataatcaaaaccgaacttggcacgtgtgtagccaatatccttaattgtattacgaacgatggacggaatgtccacgtattcagaagctgaactgatttcaccgatgacaagcactaagcctgtggctacggaaacttcgcaagctacgcgagcattggggtcgtttgcaagaaatgcgtccaatacggcgtctgagatctgatcgcagattttatccggatgtccttcggttacagactccgatgtaaatagatgccggcctttaacagacatgaagtttcaacctcccataactagtagtatggcgattgcccgaacaaaacatgacagcgattcgttcactgtaccctcgaagctttccaaaatggaataaggacgcagggtccgcagtaccgaagataaggatttttcaggtaattgcctcaaacgaaaatcaacctttccctagtggaaaaggttgcatacctcaagtgccatcttaacgtatttgtcaagacgtgtcaaacgaaatggggtaaggaaaatgccctataagtgctgctctgcctgacgaattagccttttggtgatctctccaccaaccgatccattctcgcgggaagtcagatgtccccaccctttgtattgcccataggagtgatcactcacttcacccagttcagatccaaattctgtatccgtaccagccaaacctctgccaccataacctacattgagaccaaattctgcagcaatctcatacttcatctgatccagcatttgacgactttcgggtaccactttgcgattgcttctagccatggttcctgcacctccattaattaattgtcaacagttatagagtgagcaggaacaaggttggctagccgtattaatgtttgttagaactgggtaatctgagcaaatgaaatgtatgactaatgaataattcctttaacagctacaaaaactatttcagagtatatccaccacgaaccattacggttaagctgtatttgtttccttccaagaccgtgatcccccgtccatcccttggaaaagagagcaggtgattggtcggcgctgcctgtccattcgtcaggtcaatcccgtccgtcagatcagctacaccattcgtaccttcactgacgatcacagccttgccgctacgtacaatgaactccgcgccagactttccgatcagctgttgacccggcttcaccgttacgatctcaacggcatcagatgcgcctgagaccagtggaggaagagtagtgtctccaccacctgtgctacctgagttcccggttcccgtggagccggagttactaccggatgagttgccagaaccggcgctaacgccaccacccagtgccttttgaatctgctggtctacataacttttcgttacaaccggatcgtctgctgttcctggctggcttgtacctgcaccgatggctgtattgctgtataccgacccaacccacacgccaacaccaatcgcgagcgctgcaagggatactttcatataaggtttcatgtgaatcattttcctcctctggtaatctattaactttaactatagagaaaaaataggaatgcgacaagcaaaacctcgtctccgttggggtggaaacgaggtttgtggataaatataatgctgcctgttctttatcaaaacccattcgttgggaacgtagggaactccggttcttcttttggaagcttagaaatgtcatatccgtaactttgctctgcaagacgaatacgttgtccctggaactgatcatatactgtcaaacgatacgaaccaccacgtaatttttcaaagaagctgtcctctacactccagctcagcgtctgattggttcccgcttttagatcggttcccaaagtcagttctttctcatatgtttttcctgcttgatcggtcagcgtgaggattaatttgtgttcgttctcccccatctcgatctcttcattgcgagtcaagctatagttcatctctacttgtacggatgaactacctgccagatatgctctcacactgttagcagtccaagagtacggatagagatcaatattggttagcgagccttgaacactaatggaggttggcggtacttcgaatgccaaagcattcacgtaagcagacgcttccccttcaccggttacaaacttgctgtctgcaatgccttcacccactattaggcgcaggtctgagaaggtaacggacttcggaatcttagcccagaacgtaataatcgacttctgacccggtccaggcagacgctctgcttgcttcgctgttgctctgtaatactggccatccgatgttttgaagtatcctaccagtttgccaagcccactctgacgcagtgatttattcgtcatttcgaattcggtgtatacgatgtctgatgacgttcccggataacgaatcgttctccgcacacccatttcggtctctttatcagcagtacccaaagtatatgtcttaccgcttccaacataagataccggtggaattaatccggacgtattcaacgtaatccattcattcgtttcttcttcactaactttctcgttcaaactaagttcgagacgtgaaatacgtaattcagaagggattttggtcaacaggtaagcctcggttgtcatgccagctccaagtaacttgccactttgtgtgtagattaacttcttgtctccttcaatctcagcagaatcaatcataaacatcgcttcaagttcaggaagttgaactgttttgttacctgcattacgaatggtcactttagcagcaataatatcactatcaagccacggcaaccgctgtaacgatccaaaagacacaccaaatgtacctttgttattcttaacgacagtttcggtcgtcaacccatctccactggataccgattcaggaatagcatagacacccacaggataagagaaaacaaatccattcattggagcagaagttgtcgattctgtgctttcatttttgtctacaggactcattacatacagcttgattttgcttgtatcaccatcaccctgaagggttacacttagcttaattgtcttgatatcgccggggttcaacttcaatgtatccaatgctttggtttcgatcggatatactgttccgtctgtattacgtacctcgaaggtatatgtcggcaccttaatggctttcttgcctttattcttgagtttcatttgaaggttaagattgtactcaccatcatcaattcgaactttggcagattcaatcaatgtggacagtcgttgtccttcaactgaaataatgtttggttgattggcagcgacttctacattcgttttactagcctctggcaattgcaatgcagcaacaggcagaacacttttctcttcaccctgttcctctacaagcaacagctcagacttttgcagcttcactgacgtaggaagagatgccatcagactgagggccttattagcttgagcctggatactgacactcgtactgtctttatccggagttaacgggtagttcgtaccacttggcgtacgtaagatccatttgatattcggattttcaagcaatttataactgatattgtttaaattcacgccaattttcacatactgattcttatcttcacctggaaacactttaattccagatactttcactttcaccgcagagtcgcttagacgaaccgtcttcggcttacctacaggtgtggtaatactataggatgcgggcacgttaaacttacccagcgtacgttcatagttagcttgactgaaatcccatttcacgatgaggaagttcagatcactgagtttcacctcgcgacccactttcatgacataggtcaactcaactgttgatccaggggcgaccgttttcttttcctgatccttcgcaatcagtttaggtgagaacgatgttccacccttggttttcactttgctccagtaatcgagcatcatcattggggtgctgtcattgttcttgtaagacaatgtatacgtaaccacattaccatcgtcctgagctaagatattgacatcagttaatctcacggaacttcgtgctgtcactttaacagcagataggttaccgagtgtatgtacaacctttttcgtggttgatgtcgttttcttcgatgtactgttatttgaactggtggcagacgttttattggttgtactcgttgccattgcaatgccagccgttgaactgatcaacatcgcactcgcgagcaagctcacaaacattttcttttgattcacttccaaacctcccataagttgcttgttgctttatagtataaacgtttggaatggtgagaaagttacgatgttgttggtattttataaaaccgtgcgatttttatcgaaattaggtttatgttcaaaacaaaaaaggacctagagaaaattctctagatccttttgagataaaggattgattattgagttctaactgcacctttagctgtgattacgttaccttgagtatcttggatatatttagcattatccttgatttcgatagagtaaccatttgcactacctttagcgtcaacaatctcaacgataaattgagcaggtgtagttgcagttgcattaactacttgaactacgttgtaatggaaatcagtttggtttgtgaatgcaggtacctctttattgtcagacaagcgagttacgataagatcttgagcatacaaaccaacaagtgctggagtagcattcaagttttctgttacatttacagtaacactgtaagtggaaccagtaactgttgtagcataaatattttggttagctgcaacttcaggtttaacttcatctttgattccagaagaaattacaattggtgctgcaggtgttgtagctgcaaatgcaatttcgttttgagcagcaccaatgaatttagtaccatcaaattcaacagacaaactagctggagagtaaacatcacgatccaatttgattgtaattgtatctgtatcattagcaacaacatcagttacaccgtatccagctactttaactgaatttttgttaactacacgagaaacagattgattcaatttcactttgatatcacgttttgctgtaagggaagcagaatctcctgcatcattatagtctacaaggctgatataacggtagtctgcaagatccaatactgtgttaaatccagccaggtagttacctgctacgtctttaacaccttgtactctaacttttgtaagcagactagaagttacatcttggcctccgatagttacaggcaattcaattacaactgctttaccatcttgtgttactgacaggtatgcatcgctcggcaaaccgatttctttgttatcaaaagtcaaagagtaatttgcacgattcaacaaggattctggatccattttttcgtcaaatacgataaccgcacgacgattgttgtcagaaacattgaaggaaacagaagcaactttaggagctgtagtatcacctacattaaatgtagttgtgtaatccagcattacgttacccagaaccgtcgcgtctttaacaccagcaatattcaaagtgttagtgccttctggaagatccgagaagaaattaaccaacagaatgtttttagtcgaagaatctttgaaagttacactggagatttgacgaactttaccgtctttatctttaacagtgatcaatttcaggaaatcttgactagcaagtggtttgctgaatgtcaaagctacttgatttttagttccagttgttacacgtgcatccagaacttgtggacgctctgtatcaatttcagctttaaccagtttggacgtttgagtaatttcgttaccagagaagtcttttactttctctacgaaaattgtagtttcgtaagaaggaagagctttatcagtatcgaagtagaactcatatttgttagcagacaatctaactacgctgctaggagtaattttggaatcgcctcgtttgtggtaaacgttagctttgtccagtgtagaatcatcgatatcttcactgaatgttacagtcagtttttccaaagttgcagtagcttctgcgattgttggagcagtagtatcttcaacaacagagaatttgtgatcggatttcaaagatttgaaacctgcgaaatcttcaacgccagttactgtcaatgtgtgttcaccaacactcagtgcagagctggatttcagaatcacttcacgaccttcaacatttggagagctgtagaaaccttgaccatcaacttggaagttgtttgtgtaagattgttttacaggctcgctgaagatgattttgattgctttagttcccaaaccagttacacttacaacttcaggaagtttgttgtctaccggagtaaattcaacattgcttgcttcaattgttctagtaccagctttaacgccagtaacagttacagtgtatttttgttggtttttgaaagattgatcttgatccaaagtcagaaccacttcatttgcggaagcgctcagtactgcggatttaacagtcagattagcattcaatctgtagttatctttcaattctgcagtagctttatcaactttaccgtcaaacttaacagtaacttctttcaagttgtctgcagatacggattgcaattttgtagcttcagttactacataagtaactttttcagtaaactctttatctttgtaagtgaatttcacttcagtttctttgttagcttcgagagctttatccaaagttacttttacagtttcgccgtcgctgattttgaattcaacaacttttccaccttcagttactgtgtaagattcaactttaatgctttgagcttgatcgatggagtaagctgcacctaccaacaattcacgggaagcatttccgctgaagttagcgttagcgtcgatcagacctgcgttgatcgctgcttgaacataacctttagcccatgctgctgcactgttgttagtttctgttgggatttcaagatcaagtgcacgagtcaagattgtagccatttcagccactgtcactttaccgttgaagtcaaagatttttttctctacgtttttaccttccatgatacccgcagcagttactgcttcgatgtaaggtacagcccagtttttagctgtgtagtttttgtcagtgtaagaaagagttccagtgatctctttcagaccgagcaatttagtgataacttttgcgaactcagcgcgagtcatctctttgtccagaccagctgtgccatctgggtaaccattgaagataccttttgctttcaatgcatcaaactgttgttgtggtgttactgctgtgtcaccgaatgctacagatgcaaacattgagaatgccattgctgtagacagtgctacggataaaattttcttcataacctttttgtctcctccttgggcgttcataacattggaattttctttaatagggtcgctcgtattcctcattctattgtcgcaccccctttccagagttatgagcaagttaatataaatgatgtctgtgagcatatcacagaaacttgtaaacaaaaataaatgatagaatcatacgtaaatagagtagtttcctaatcctaccttacgtattatacaatgggtctctcgtgccgtaaagcaattttttctaataaatagacaagattcttcacgaggtcattcttggtaagttccccaatgttttcgactctacatcttaaacgcagcagatttcaaaaagttgcggattcctcaaaaaaagttttgaatttatttatgtattgatgcagtgcaggtctttaacaggttcaaaacctttaatgcagttgtatttatgacgttttctccgtaatcactctgtgtaaggaatgatgtggacgtttatttatacccgttactttccacgatgaagcgacaaattctacaaaattgaataaaaaaaagagggcccctcaaggctctcttcttggatcagtgactataacttagcgaatcttcatcgccagctcaataatctgagcacgcatatttggatcactagtcaatctcagatacatatcgtcaattggctgtctgttctcccggtatgtcttctcatgcttcattgtggtgtgagaccattcaatcaattcattctcggccagaaccagactgttatacgcatcatggaagccggtggactgtacaagtccttccatgacttcctgagagatctcctctgtcttacgtgtatcttccaactttttctccagaatgactgcctgcttctcgaactgtgtctttgccttcatgtaacccaactgggctctcgaataaatcggtttcattagctaacttcaccctctagatcattgtgtatttaccgttattgtatcttaatctctagcaaattacaaaaatagttattggtaaaaaacagttttcttctattataaatgaattctatataagctgttctacagtcataaaaagaacccacccctttagtaaaagggacaggtccttcctaaaattatctcaactatgctagattagctcaatgttttagggaataacttcgtgctcttcttaagcaactctacagcaattttagctgcttcagcacgtgtcaaattccctttagggttaaactggtacaacgttttagtagatcctgtgacctgcacagggctaccttccatgattttcgatttggttaccgcctgtactgacggacgagcgtagtactcaatggatgtggaatcctggaacgacttcgctaaagctgaagacaatttgctatcgttggccgcaagcttgctgctcattgcccgtgcaatcatcaccgctgcctgttcacgtgtaatcgagtcctctactccaaaatacccgtcgctcaaacctgttacaatacctgctctcgccgctgtttcaatggaggcatagtcccacgtatcactcttggtcgtaggagacacgtcagtaaaggtttgtatattggtatagttcaatgggatatccagacctttaactagcaaggtagcgaattctccgcgtgtcgtctgatcatctgaaccaaatgcgttgaaacgcaggttattcatgatccctttggaatacaatgcattcagcagatttcttgcccacggatgatttgtgatatcctgataacttttactttgcttcataaccttgtagtaaccaaattcgtcaaaggaaaccgtaattgtgtgtttcttggtgtctactactccgccaatcggtacccattcaccaatattagttttgtctgtataacggaataccgtaatcgttgaacccacttcatcaacaatggacggatcatacgcaagtgttaacgttccccggttagaaggaaccaggacacgctctgttggatattgcgtaaagctcccttccagggagtatggtgtcacaccattcgttccagacttatatccgctcgtccctttatctccaagctcaccaatcccaccgttaatccaatacgtatcagagatcggcacaaagttacttgtagtcagattcgagttgaacagttctgttaaaatggttggtaccgtgatcggtgtcagtcctcccgtactgcgaggatcagcctgcccgatattaaagccatagtcatttttccgctcaagtacgccatcctttggatcggcaataccaaacagaattttgttgtcaggataaaacttaattaccccactgctcgattttgcagcggactgtaatatggttcctttcgggaaagccagttcaagtttcttgttaaacactgagtatttattgacaattttaggtgccatgtactgtgcatctgtcgctactgtacctgtgtagaatacgttgacagtgtcgttgatggcaccgccatccctaacaatctgaattttgatagcattgctcttatcctgtttcagtcctacataatccagaacaaagcgatcattcatgtccggacgtttaacggcaggttctttattgatcaaaacctgagttgctccttcagcctcaatatcaaagtgcacatagtttttggtaactacgatctgttctcctacagttgctacaggagacagaattcgataggaagaaggctctcttacaatctcgagtctttgtgtcgttcttgcacctgttccgttaattaactccaacgtatagacgtggctgccaggtgcatcaaagacatagttacgaatacgaatcataaattcatcttgatttcccgcaaaatcaaatgtgtggccgtctgaagtctgcttgttaatatcctgtaagtccgtacctgggatcggattataactaaatatcagctttgacccagaatataagttggcaatctgtgcaccgccacctttgaatacaaggtcatatcgttcttcacttgttacatatttgccatcccgaatcacaaaatctggtgtaactttgaaaattttgtccatttcctctgttgtgtatttgctcacatctgcatcgtaaaattcctgacgagtgtcagtaggaacaagggttggcatgaatttatcaatattggatacgttactatccgagatgtaaattctcaattttttctcaataattttggctttgccagcaccatcctgatcagtaccaataatcgtgatcgtgttttccccgtatactagcggtccctctttcttaatgtctaatgagaatgagaacttgccgtttgttcctgggaaaccagtaaccttgctttgatcgaccccattcactagcaactggggaacaaattggtttgagctcaatgtgctgaatccgataaactcgccatctacctttaaagtattcgttattcttgagttaaagttataggtctgtccatcgtacaagttggctacatagatatagcttttagaagcgtaagatacagtaacgtcgtaatatggatctggcgttgtgtaataaaagcgaattttctgagtaccattggccaggtttttgaccaaatatactgcttgtttgcttgtaaggccagtagcagccttatccgttgccgaaatattaaccttattggtacctgtaggcatgtattgaccaattggtaattcagtaccaatgtcttgactcgattcaactaggatatagaagctatctttatcaatctgtgcattatttaatgcgactttgttcgttaccgctcctccagcataatctggaaggtagtacatattcgtaattgccttcacatcaggcgcgtaagtgaatttacctttgtaaccggcactgaaattgccataaacgaccgcaacatcgactgtctgattcttggcaggttttgttggatcggttgtaccgggttgcaatagatattcattgtctgtcttgaatgttaccaaacgatactcgggtgtagttccgtctggacccggaatgatgacctccttaacacccgtcagtgtcattggtgttccattagctgaaaatgtccctacatcctcgaatgcactgttgctggcagtgtagggcaatattaattgcacatcaagcttagctccgctagcaaccgtagagaacgtaggtgtaacatcgagtactgatttgctgtcggtatcactcaaaattacattgagcgctgagaacggctgatttttatcataataataaacggaacgctctgtaatcacagaatcggaaccattcgctatggtgaacttcaaattattcaatcctgcattcaacttaagctggggcgtgaaaaatgtcccgtttggtagcaaaggggtatccagttcttccccgccattaagggaaaccgtaactttggatgaattctgaactttaccttgtactgatacgagctgtgtatttacaacagtctgcgatccttcattcagaccataagacgtgttggacccagtgctcggatcggtaaaaatcttgaagtcctgaataaaaggaacctgatcatagagcacatagaacgtgtccgagcgttccactgcaccctgattaccgtaaaaggtaattcggttgaagcccgggaacagtgtcagattgttagcagagaatttattgttaccacttgtgcttgcagtaactgcagtcgtattcgcacgagtagcatctgcttcccacttcatcttggtgcttcccgctgtcacaggaacggagttaagctgttctacctttacccgcatcgtatctttggatacgaaagcgtaagcacctgttatcgtaagtgtccctgaagtcgtttggtaagccaaagcccgggataggaatcttgcattatctgagtcatccaaattaagatcggctgtattgctaatagtggtattatctggtgtgaaataagtagtctgtgcgttggcagccgaagcaacggacccaccgaacagaccttgtgggaacaatgagaacaccatggtgaccaacatgatccagaccaacggccgtttcttttgttgcattacgtatcatctctcctctttttaagtcagttacctttatatatcggcaaaaagatccaattatttagtaaaaatctcaaaataaacaaaaaaccttatccacgagggataaggttgggtctggaataatattcaagaatagctgtaaccattacatttatctatttatgatttcgaacgggtctccggatttaacttgacgcgcatgcgcatcaggaagttaataaccggtcttctcgttttgctaacaagtccgatgacttctgctcccacctggaggaagaacatcatgatacagatgaccacaaatgttacccaattcgcttcaaacatggcagcagaagattggataatcgccagaactccgaagaatgcggcaattccataaatgatcagtaccgtctgacggtgactgaatccaagttcacgcaagcagtgatgcaggtgacctttatccggtgcgaaaatcggtttccgttgtaccgcacgacggataatcgcgaagaaggtatccgagagcggcacaccgataatgatcagcggtgtaataaaggacacgatagcaatttgtttgaatcccagcatggacagcatcgccagagagaaaccaaggaatagtgatccggtatcccccatgaagatcttggccgggtggaagttgaagaataggaatccgataatactacccagcaatacaagacacatcaaggcaatcatcatgttacccatcaggaaggacatcacggcaatggtaccaattgcaataccagatacaccggcagccagaccatccagaccatcaatcaggttaatcgcattggttacaccaacgatccaaaagatcgtcagcggtatggatacccaagcttcgagtgaagagtaggaatcctgaaacggaatgttaacgaaatctacccggatattaaatccaaatacaacgacagaagcagcaacgatctgaccaagcaacttcactttggctgacagttcaaaccgatcatcgagtgcgccgatcagtacgataattgttccaccaatcagaaacgcactgacaaaactcatatcacgagtcgtaaaccatgccgatacaaacggaagcaatgcagcaactgtaataataaaggccaggaatatccccagaccaccaagacgtggcatgatccgtgtgtgtactttacgtgcattcggcgtatccatcgcgccaatgcggactgcgaactttttgacaagtggtgtcagggcaagagccagtcccattgacacgataaatccaatgataaagatcgctaccatttgaacattcgacccccaattataatacctgtacgaaattataaatcccctgatctctttttatatataaaaaattatttgttagtcacttttgatgaaaaattttgttacacgataacggagagtgcaaggaaaactagagaagtgtaacgttcgcatttatcaccggatttcatcctttggaaaaggataaaaggaaatctggggataacggcgatcgacaggttgccttgcaatcgtagtgccaagtgtaacgcttctgttttcatggagtggcacacatgtaatccggaatgaattatacgctcatcacacccgaaaagccatcctcaatttctagcaaaaacacgcatttatctcgcaattacctgtttttaacggactttcgtcacgttttctttgtcacgcatcaccttaacagcgaatttcggaagcgcaagcatccggccagcccggcttggttcacgcaataagcgataaaaccactccagtcttaacttttgaaacaggataggcgcacgtttggttttgcccgaaatcacatcaaagctgccaccaacgcccatggttacaggaacctttagcgcatttttgtgtttgtgaatccacggttcttgggtgtctgccccacgtgctacaaacaacagatcaggtgccgcttcccggatggaagcgatgacctgttcatcctcagccggaccaaaataaccgtcgcgataacccacaattcgaatcgccggatattgctgttgtaaccgaactgccgtttcttgaatcacctcaggggtggaacccagcagatatacgccccatcgatagttttctccaacacgcaacaattcatgtaaaagctcaaaacccggcactcgctcagctacaggatctccacaataattcgcagcccatacgacacctgttccatcaggaacaatcaattccgcagcttgcatgacttccataattgcgggattttccaatgcggccataaccataatgggattggctgtaatgacctgatgtggtgtctgcttggatagcacagcttcctggagaacctttaccgtttctttcatcgtcagtttggaaaaaggaatgccgtagatcgaaacggtaggtattgatccggtctgactcatctttatctcatcctttgcggcctaaatagttaataatctgctgtgcaggcactctggcttcctgcttcagttgggtgatgccttcttcatgttccttcaaccactgtgaacgttgatccagcagtccaacaacagtcttagcgagtttgtcgccatcaagtgtatccgtattgcctgctggttcactgtccagacgaagcaagaattgatcaattttcggatcatacgagatacccaccggaggcacatattgcgaagctgcgtagatcagactgtgcagacgcatcccaatgacaagatcacagttgctgacttcctccagcataagctgaggatcggtcagatcttctgtgatgctaatctcgctgcctttgctgttcacatcaccgagcatttccataaggaatcgtgatgcctgttcatccactggcaaatgaaatggcagaaaacgcaagtgcaccgctcttttggagcacagctttttcaatccggcggcaatagccgtaagttccttccggtctgactcccagaaacgtaccgatacgccgatcacaggaagcttggtatgtcctccagttgaaggttccactcgattagcttgagtagtagcatttgctgagacagcacctgcgcccctctcaacttttgtttcaggtaatggcaaacccattacggggtcgggtacaacatggatctggttccactgtaaccccagcccacgcaggtagtctgcagattgttcatcccgaacggacacataggtgcaggccttaaagaccgatttgatcatcggattgaaaattttacgattcactgggccaatcccctgtgcatagataaacgttggttttttcagccactgggccagcttgattacacccagataataaggaatggatttcagtccagttgcatcctgcaataggcttcctccgccactaattaacccgtcgctctccttgagtgcttcacggacttccttcaatttcatacgatgcacggaacgcacaccgtacatggcagttgtcgactcgggatcacccgagagaacaataggttcaatcgttatgttcgacctttggctttcctcttccagcgctgtcaaaatcgactttagcaccgcttcgtctccgctattgcggaatccgtaataccccgagatgactaacttttgagaagtggtgaccattttttccaacatccttccgctacttgccacacacccacagcaatgataccgaagattaagccaagtcccaatcccatcactccacgaatgagtgacaatacagccggcgtatggatatgcgcgaacgtatccaccatggacaactgtccaatcgctgcaataatgagcacaaagatgactttacgatattttaaagcggcgaacacgccaacgataaatagcgggtgtcccagcataaattctttgaatctcggacgtacaccgaacgtatcttccaaagtggtacgaaggaacatctctaatggtgttactgaacccgagttgcctgtacggctcaaataatagtatccaacaacggcagcaacaagtgccaaaacaaccattaacacattaattggcatacgaagcatttctttaattttcttaatagagaacgaatccgaaccacgataaaacacaatatagatcgctaccagtgccataggtgcaaagtgcaacagactcacgccgcggaactggttaatgaccagactgtacgtaatgctgttaagcaacgcgatgacaaaaggtaccgccaggaatgacagaatcgaagttcttacatataacaccaacgtttgcttcaaacgacgacccgcagatgcgtcgggttgacgctgttgctgatagttcactgtacgaacggccagcaccatcgctatggtcggcgcggcgattgccacaagcaaggcaattccttgctccagcagcgttggtttcaaaaggaacaatcctgcactgcccaccaaagcgaccacaaatgcgatcaaagtcagtagtgggataaaataagaaaccataagtgcaatcatggcaattgcaccaacaagagcaaccagcttggcataacgctgaatcgaagaatccttaactgtaaatgcttcagcttgtcctagctcgaatccatgcttcgccatgcgttctaccgcatgacccggctcacccagactattgatcagattctcaattggatctgtaatcatagcctttgctgtattccggcttggcgatgcattcatgtagagcatacgaatattgcgatccttggttgcgagaacaaaacggtcagcaatcgtgtctacgtccagattggcatctccatcactaagcgagtacagacgcgtaacgttgtaatccgttttatacgcaagagtctggaaaccagactgtggtttcttcaagttctcgatggctgcaagaccaatattgtgcttgttcagcaactgtgcgaattggtcgagacttttcatctcttcattatcattgtaccctttcacagcatcaccatcaaacaagatgcgctttacgccattctcttcgaagaaggtaagcaagcgctccatcgatccctggctgtatggcacactgtccgagatccgcggcaaaatgtagaaacctttatcacgcagcatcttcacggcaaccggatcgggctgtaaaggctgcatgttggcattctccggaggagtctgcaatattaagccgctacgaccttcatattcccaaggtactaccggaatctgccgatcagcgaacgtttgttcaataataggggtatacgtctgtgcgttttcctccgatgtaaataacacatacgtgtaatttgcattagaagggatcacatctttggtcaggttcgcgagatcctgtccgttatataccattagtcggcgtgtctttctcagctcgtccaatgtactttcgaacacagccatcgttgttacgcctgcgtcttttagacgagtcaattgttcattcatgaaatcttgcggatgtgcctgatacgctgagatatccagcagtcctcgatagttgaaaacaagttccacctttttggcagaagattctgtctgcacccgatcactgatgacagggatggacgcgaccagaccgataataacgacgagccacaaccacttccgagaagcgttattccaataaagccatttttgacgcactacatgtacctcctcaagtgttggaaccaaatgcacgttcagctcaagtaattcgttcatttaacatttatacaataggttacaaacagcttgtgtcaacaagccctcttatatgctagaaccatctacacttttatttcaaagaaaaacccctccgccaaccaaccttacggtgcggagaggccttctcatgttcttgctcattgttacattcgtattattgtgcgtctacacgcgacatcactgtagtcaccagacgctcgatccggctttccgcatcttccaaattctctccacgcacggcgaagtatactttgatcttcggctctgttcctgaaggacgcaagcagaaccatgaaccgtcttccaaaatgaacttcagtacgttctccttcggaagaccgtccagaccaagggagtagtccagtacatcttgtacagcaattcccgctacttcttgtggcggattggaacgccagtccgtcatttttgcttgaatctgagctacgccgtctttgcctttcagcgtacgggactccagcttctccaagaaatatccgaattggttgtacagctcttgcaagacatcatacaacgtcttgccttggctcttataatacgcagctgcttcagcaatcagcatcgaggcaaggacagcatccttgtcacgggcatagttaccggaaaggtagccataactctcttcatatccgaacaagaatgtatgactgcctgttgcttcgaactggttcattttttcaccaatatatttgaagcccgtcagtgtgttcatcacttctgcaccgtaatgttcagcaataacagcacccatctcacttgttacgattgttttgacaaccgcaccattgcttggcagtgtacctgtctcttgcaggcgactgagcaggtaatgtaccataatggcaccagactggttaccggacaagacgaaatatttgccatcattgtctttcacgacagcacccatacggtctgcatccggatctgttccgatcagaatatcagcgcccacggattctcccagcttcattgcaagcgtaaacgcttcgcgttcttccgggttaggggatttcacggtagagaactcagcatccggctgttcttgttcggctacaatatgcacttgctcgaatccgatctgctccagcacgcgacgtacaggaatgttacctgtcccgtgaagtggtgtgtaaacgattttgaaatcacggcctatgccggattgaatcagttcgcggctcaagctgcgactcgctacggtatccacaaacgcttgatcttggtcttcacccaaccagatcaggagcccctgagcttctgcttcttcctgcgtcagtttcttcacgtcagcaagggaaggcacttcctgaatgtactgaatgaccttttccgcttcattcggtaccaattgaccgccctcatgattgtagactttatatccgttatattccggtgggttatggctcgctgttacaacgatccctccagttgccttctggtgacgcactgcgaatgacaactcaggagttgaacgaagggatgggaacagcttggctacaatgccgtttccagccagtacaagcgcagcatccagtgtgaattcaggtgagaaatgacgggaatcatgagcaatgacaacagaaggtttcccttcttggtcaccatgctgctcaagcaaataacgcgcaaatccttgcgttgcccgacctacggtgtaacggttcatccggttgcttccggcaccaatgactccgcgcaatccccctgtaccaaactccaggtttctgtaaaaacgttcctccagctctttcggctgatcctgcaagtcacgaagctcctgtttcgttgcttcatcaatcgaagcatcctccaaccattgctgcaacgtctctgctgctgctctgcttaactgttccattccgataaaccccttccgtctatataaattcaggtgtgctgaggttacatcagcatcttgcatcattcggtccgtctacgttcctgcatgatgtcaatgctcacgtatgtaatcagcttgggtcagacagtgcaaacatgatctcgccttcagcgaccactttgtcgttcactcgggcagttgctttacctttaccaatagaacccttcagacgtgtaatctccacttccagaatcaacgtatctccgggcacaacttgtccacggaatcggaagttgtccagtcccgccaaaaagccgatttttcctttgttgccttccaaattcagaatggctactgcaccaacttgcgccagcgcttctgtaatcagtacacccggcattaccggatactctgggaaatgaccaatgaagaaaggttcgttaatggttacgtttttcaaaccaacggcacgtttgccatcctcaatctctagaatcttgtccaccagcagaaacggggggcggtgcggaatgatttcttgaatctgtttgatatcgagcacagtgtaatctcctctcgggatgtttatatgagcgttcttcatcatggattgactcttagcgttacggtggtcgttacggttacggatcgtccctctgatcgctgttgtctccgaatttttttgatcaacctcagagaggtcaaaattcggtgacaaaggcgagcgcttcgcttcttctgaacgattccgttccctccacttacttcggtgctgcaaggtcaacccccacatgacaaagtcgaagctcatataaaaggtttttaatttttaaattttgtatggaaagcatattttcggttaacactagttatatccttcatgactgcagtagtgaaggttaagataaggggtctctcttcgcgatgacaaatgtctttcgcaggggaggcctcttttgtgacgtcaaacgtcatccatcattatactgttttcaacgtcaaaaagaaaactcctgcctgcgcaggagttttcgcttaactcgttacattatggagcgaataccagattatatacatgttcccatgtactccattgccatacggaaccgatatcctgtttgcccagtaccacatatccagctaccattccgccagcgagggcaagaacaagcaggaccggaaccaggaaccatcttgcgatgcgccatccactcttcttcttgacttcctttttctccggcttactgttctgctgctgtgtttctgtcatcacatccaccttttacgctctcatattgttggcaagacccaacatggaatcacttgaagttagcgcctttgccgccagctgatatgtccgctgtccttgcataagcaaagacatctcctgtgtcagatcaacgttggattgctccagaaatcctggtcggatcaaggccgctgcttgacgtgtagctgcatcagcgccgaatacatcatcctcggttaatcccgcatccagtccaaataggttatccgcatactgtacgagcccctcagggcgttcaatgtctaccacttgcagttgtgctccaatggttgcgtttgccgcattaccgcgtcggattaacaggttgccattttcatcaaaagcaactttgctattattcggtgccgtaatacgattgccttgacgatccagggcaaagtggccttcgccattgaccatcaccatcatatcaggtgaattcggagtaggcttaggtcttgtatcaggtacaaaatgaaatgcaccctgacgtgtccacattttctccccattcgcttcaactgcaaacatcgcatttccttcaatggccagatcggtcggaagaccagtctcgttcatggggccttgcgacatatccttcgttacatctgccaaacgagcaccaaaaccgaggttatatcccatcggtgtggaacgcccatccagtttgtacttgtccggttgttgttgaacccgggttagcacatcctcgaaggccgcttgcttgctcttatagcctgccgtattcacgttggcaatattatcggaaatgacatccagacgctgctgtatcgcagtcatggacaccttggcactaatcatggaattattcattggtggtataccctcccttgtgtcctgtccaccctcccaaaccctccctagtagggagggccccagatggcgctgccctctggactcccgaaacaggcggattaggtaagtggggtacgatcttgctaagtgacggtggtgtgtgttcgccgcgactgccgtgctatgattcccgccatagtttcacatggctgaatcatagcacggcacgctctttatgctgcgtgtagctccgcgtggtctctccttgctttgcttcgcaaagggctgtcgagaccgtcgcttcgctcaggtactgccacgcaatcctcgcataggctcggctgcgtctagtctcttgcgctccgcggggtctcttccttgctttgcttcgcaaaggactgtcgagaccatcgctttgctcaggtattgccacgcatccctcgcataagctcggatgcgtttaggttctagcgctccgcgtgagcctctctgctttgctgcgcaaagggcgtttggctctccgctgcgcggttatatttaaacgtcggcgttacacacgcccgacttcattgacggctttatccagactgcggtcgtagaattgtacgatcttctggtttgcttcatacgcacggaatgcggcgttcatatcaaccgttgcctgtgaggcatcaacattggaaccttccaggtaaccctgacggatctgcacattatcaccggcagccatcatccgggacgttgccccgtttgcatcgctgagactgaaattgccattaccttgacgaaccagttgattcggctggtcaatgacactaatgccaagagtaacccctgttggtgcgcctgttgctgcatccaccaaacggccttgctcatccactttaaattgctctacggaacctgtcaacactacaggttgtccattattatccaacacttgtgaacctgttgagctgagcaattgtcccgttcctgtgatctcgaagtgaccatcgcgtgtatatccggtgttaccttctgcatcctgaactgtaaaatacgcctgaggctggtaagtcaccgtgccgtcggcccgtacaaatttgcctgatgcgtcaaacgggacaggttgtccagtctgcggatcattgactgtcatattggatgaaatggaaaaatcatttttttgcccagtctccataacggtcccctgcaaattcatggacaaactctcttccgcgaacacccccgtgttcagcttgcccagccgctttgttggaagatttgcatctccgcctaccaaagtaatgagcatttccgggaaggaacggcttacgctgttcacctgtttgtatcccgtggtgttcatatttacgatattctgtgttgctgtgtcatggcggcgttgttgcgtaatcattcccgcagtagcggtgtacagacctcttaacatgaattaacccctctcctcaagcgcttgacctgcatcacaggttggctgcttgtccgttctgctttccgagcatggcgaacctttgctatttatatcggcagattagaactttttcttaaccacctgatccaaattattaagcattatgcctgtccccttcacgacacagtgcattggatcttccgcaacccataccggtacatgcaattcattggacaaaagctcgtccagtccgttcagcaacgcacctccgccagtcaatacaacaccacggtcgataatgtccgctgacaattcaggcggtgtacgttccaataccgatttggctgccacgatgatggattgtacggaatcccaaagtgcttcctgtacttcatttcccgatatcgttacggtaacaggaaggccggataccatatcgcgtccgcgaatgtccatctctgtttgatgtccacccggatgtacggtaccaatcgcaattttgatatcttcagcggtccgttcaccgatcatgagcttgtacttggctttgataaacttgataatggcttcgtcgaacttgtcccctgcgactttaatagaagaggcggtgaccacgtcgcccatagaaaggactgcaacgtcagtcgtaccgccgccgatatccacgaccatattgccgctcggctgaaaaatatccattcccgcaccgatcgctgccgctttcggctcttcttccagaaacacttctttggcaccactgcgttctgccgcctcacggatggccttctgctccacggaagtaatgttcgttggtgcacagatcaaaatccgagggtggctgtaccagcttcttgcacccacacgattaatgaaatgtctgagcatcgcttctgtaatctcgaagtccgcaataacgccgtcacgcagcggtctaatggcaacaatgttacctggagtacgccccaccatacgacgcgcttcttccccaacagcaaggacacgcttcgtatctctttcaatggtcacgacggaaggttcatcgaggacaaccccacttcctttcacgtgaataagcacgttagccgtgccaagatcaataccgatatccttgctaaacataaaagagcccccaaagtgatattatttggtcagcgtatcctgtgaaaaagagtcccttatcacgtcaccgctcgttcgacaaagtgcaacatatatatgtaaaaatcgggctgataagatgtcataattcgatcctgtaccagcatttaacatatcatacttcaggggagggattcaatgcatgtgtgagctttttggcctacgtctttgtgaagatgcttacgatttggcggaagccaacacctcacgtttcttgccactcgtttttttgtatttaattttggtcgcttcaccgccccgcaaatggcggatggacttgtgatactccaaaatgtgtttcacctggtcagcaagatcagggttgatttccggcagacgctccgtcagatccttatgcacagtactctttgacacgccgaattctttggctatggtacggaccgtattcctcgtctcaacaatgcagcgaccaattttgatggtccgttccttgatgtaatcgtgcacgctcccgcctccctactgtgtggatagtttggtacattatatgaggagcatgcctatatattcgcggtttagaggtgtgacaagcttcgaaggtcccattattttctgaaaagcacaaaaagagcagaggtttaaccccctgcccgtcatgttgctgcggtaaaattcatttatttttccggaagatatccttgagggttaaccggctgtccgtcttcgtacacttcaaagtgaagatggttgccaagcgttttacccaattcattgacgccagcggatgcaattgcatctccctgtttcacttcgtcgtcctgtttcactttgacgtctgccaagctttggtacaccgtcttcaggttatcgctatgtgtgatttccacaacttgacctgtgagcggattttgctcaacccgggtaactttaccggcgagtgctgctttgacttcaaacgttttgttatccccacgtgccagatccacacccgtgttcgggatgaatgtatcattgtactgcaccattgccgcttcatgttcctcggttgaagcttcgctatcatagaaaggtttcactaccgaaatttcggacggtaccgctaccggccacacaaaattctccgactttgcaacaacttccacactttcttcttctccacctactgctgttccttctgtacccgccgatgcacctgtttctactaccccgctagcagggtccgagtttagcgttttgtcgcctgtgccctgatagacccacactaaggttagtataatgcctgctgctgcgatgtaggctgccgggaagacccagcgtttggacattgctcttttccatgaagagggctggctagccggtactccttgagttgttttaggagtttcttcttggtttgtttttttgttttgttcattcatgttaatcacctcagtaacaagtgttaccgggtgcaactcttttatacacgcgcgactctaattattttcacggaggtttcagagagtgctatatatggagtgtgtgtgcagctagttggtgcgccgcttcggggccagaaaacctttcgaccgctggttactaccggatttcaccttcttcaaaggtgaaatccggtagtaaaggcggacactttgtttctacaggtcttttctgtcccctgcgctccccatacggctagcactctccgcatatatagccaaatctcgaaagctccggaatgggtgttggtagactggtccggattggctgtagttgccaatccttctatgaagtgcatttatcggtgagagaaaggatataggatgtgactggataatgcagatttaaaccgcccaggttctttgaaagtgagatgtgagattagagatagacaaggcacgccaatactgactgttccatctaacatctagatttgaaagaagctaaatcatgaatggttacagtatagttagaagttgcttggtagacagggaacataaatcaattttttaaccttagggcttggaaacttgatttcaacgttctggttctggttcggcttgcttattgcgaatgagcatgtagtgaatggcagtatccaccattttgttagtggttagaataataaaatatttctaacgaactcagacggccttattggcggggaaatcgcggcttaggaattctaacgaaccgtagacacgctaattactcttttggtcgctattatcggatcaattcggtggtatgtcgtgatataacgtgtctgagattcgttagaatttccattcgttgtaatatcacctgataaggcctcccaggttcgttagcgcgcaactgctctcattcacatacatttgcacacattcgcacatactcctactcattcgaattatttcgctttatccatccgtgttcatctctcctacttcgatgcaagcatcttggatgcctgtccgaatgaaatgccggtatagtagtgtttgagaatttgggtggccgtgtgtccctcctgcgccatgccgtttgctccccattggctcatgccaaccccatgaccgtaaccgtacgttgtaatctggatttcgtcacctgtggtcttccaactgaactggctggatcttaatccaagcagtttacgaacctcgggtccgctgaatgtctcacctgcgatctgcatttccttaatccgatgtcctttggttgtagacaatacttccatccacgatccacccttctgggcggtaaccggaatagcatccaagtttaacttctgcagaatatcattacgcttcatggtgacggtctgcttgaatcctggtgccaggtttttgtcccacggactgtctacactttgcagatacggcacggcgttcccccatacatcctcagcattctcggtatacccattacttgtggaaaaaaaggatgcggtgattgccttgccctgatatgtcatcaccgtatctcgactttcgcgtacagcctgttgcagcttctcccattccttcgccttccctagacgcgtccaatccgattccacctgatctggcggaataaacacctgatggctgaccgtatccgtcacatccgccgcacctgatggaacaccgcttgtatcactcgcagctaacctacgcacgataaatgtacgagctgctattgcctgcgcctttaacgcctccagtctgaattccgcaggcatctcagctgccaccaccccggtaacatagtcttccaatggcagattcatcgttgtgcccgttgcagacaggtatacgcgcactttaggttcagggtacgtaacaggaacggctggcgcaggagctggggttcttgtactgcttgaatctgttggagcagggatcggctttggtgattcgcttgtccgcggccataccagaattaccggaatcagtaacgccattgccaataaggcagatacagcggtagcaggttgccatcgcgtcgtattacgtccccatcggggttttcgtccaaatgtccgcattcggcgacgcttcactcggcggaactggtccagctcaataacaggtatatgaatatgctcggttgtctgtcggttcagttcatctgccgacacccgtcctggattggataatcttgcaggctgtgatggaacagtcctcaggttcaatggggcaggcttgtctttttccactccagaaacgatatttccctccggctcttgcatacctggacgagggacaaggggtacctttacctgtacacgagcttctttcattcgaatataaccctccgttatctatggccggacatgtgccggtcgtgttgttcaaatccatagtttaggttatgagctggcttgatctgatagaacctgatttgagagaaacgaggcccttttcgttctgttcaatttcttgttttcttttgctatgtacatcttagaaacgttgatctgtcgctgaataccagtgttagctggaaccgacaccctatataaagtacgctctttcatttggttcagaatcgatacagaatacgatgttatgctatacaagttaggaccagctattaatagaatcaggtatcaaatatctcgttgtcttcttaaaagtaaacacaaaaaaagccaagccagatggcttagctttatcattttttacaatatacgttccatcgcattcataatccacacaaccgtgtgactcataatagagggccatattttttctattcaatccagtgttaagccaaggttggttgtaccttaaacatcggtacttctttctccactttttcactaggtgctttggttgcttccagcttaggctcatcaaccgagatccgatagatgtcagcgccaaggccgttaagcttctcagcaagatgtacatagccacggtcgatgtgatgaacaccgcccacttccgttgtaccttcagcaacaagacctgcaataatgagtgcggcacccgcacgcaaatcggtagccgttactttggcacccttcagtttggcattacctgtgacgatggacgaacgtccttcaactttgatctccgcattcatcaattggaattcatccacatgcatgaatcggttttcaaaaacagtctctgtcacgacacttgttccttcagatgcaagcaaaagtgccatcatctgggattgcatatctgtcgggaatcctgggtatggtaatgttttcacatccacagccttaagagggcgatctgcgattacacgcacgccattctcatccggttggattgtaacacccatctcttcaagcttcgcgataacggagcctaaatgatcagagattgcaccttcaatgtacacgtcaccaccagaaattgcagcagcagccatatacgtaccagcttctacccgatccggaataacggtgtgtgtaactcctgtaagtttctccacaccttcaatgcgaatcactccagtaccagcaccacgtacgatggcacccattccattcaggaagttggcaagatccacaatctcaggttcttttgccgcgttctccagaacagttacaccttcggctaatgttgcagccatcataatattttgagtggcacctacggaagccacatccagataaattttcgcgccacgcaaccgtccttggctacgagcttcgatataaccttggcccaagctgatctctgcgcccatggcttcaaaacctttcaaatgctgatcaataggccgtgtaccgatggcacatccaccaggaagtgagattcttgtatgacccatacgagtcaacaaaggccccatgaccaggaaagacgcccgcattttacttacccattcatacggggcttcacaggaagtaagtttctccgcatttacggtaatcacttcgtcccggtatgtaactcccgctcccagcgattccaacaccttgttaatcgtcatcacatcgtctagaggaggcgcgtcaataataacgctttgtccttcttcccctaagagagaggcagcgatgatcggaagaacagaatttttagcgccgctaactttgacacttccggtcaaccttttgccaccgcggacgataaatttgctcatcatggttccctccgcgcttttattcccttttcttcattccggaatacgtaagccccactatgctagaaaggactgttgctgtgtgtggaatttcgacatattctggcatattgccacagatgtctgttcagaaaagaattggtttttataatccatatcaatgataccatgtgccgtgcatcttgctattcagcatgtaaaaatcagtgtcttacaagcgagcagagcatcagaacagacagagtgggatggttattagccggcatgaaccggatatcccgtttataactacaaaataagtgaacaattgtgaattccctaacttccatcataacattgttgaattgtacgatacaagcatttttacataaaacatctcaaattcatccaattttacgtcacatttttttcttaatttctttaccgacaactcatactctaattgttaacacaattaatcgatgttattcgacaatgagcagcttgaagaacctaacagatgattaaccaaccatctcaacattaaaacaaattacgcaacatttgagtccaggacaagtagtcaatgacaaagccagcaacggcatgccccaaaatgatggcgagcaacaaatgcaacagtcttccctgagcacctcgtggttgcctgatgattaaatccagtttgagatttgtcaaagcccaccaagacaacgctatacataacagggagacgatgattgagaccaagccattggtgcttaacgcctggttcacctgattcgtcagatcagtatccatatattctttacctccacatttgttgcagcgatcagcatatcatatgcccggcacccataacttgttagtatactggaatgtcttgagcacaacatactgagcgtactgtcagatttactcctgccaggcaggaatctcctgatgcccaatcaccgagcagcaacaatgcggctgtgcatgactatggaatctactacgcagcttcctgcttctgctgactctatggaatataggctctttcatcatacattgtcaattacattgatttccacttctaaaatattttaattttaaaatgccgggattttgtgactaaaacgacataaaagagcgctatttcgatatcgattctgtcatttcctcggaaataatttaaatttactcatgaaaaaaatggttctcttagtggtaaatgcgcccactactttagtcctacattctattcaaataatcataatcggtgaatattttgcttaaaatacttctgtttactgaagggataggatggatttgtggtcagcccttttgatatattcgataaaacaattctattaaacaaactcaaaaaagcccggcagactaagccgccaggcttcaaagaatcgtttatttgccgaacacattaatccggttaaccgctttttgcagcgcaatctctgcacgacggtgatcaaagtggtcctgattgctttggcttgcaagccgacgttctgcccgctctttcgccgcacgcgcacgatccacatcaatgctttccgggaattcagcactctctgcgagtacaacaaccttatctttacgaacttcgataaacccgccaccgatagcaactcgtttattttcttttccgttatggatatagattggtgcaatctgcaaaggtgtaaccataggaatatgacctggcagaatgcccagttccccttcaataccacgagccgtaatgctattcacctgttctgaatagaccaaacgctcgggtgttacgatttccaacaaaaaggtgctcaattccatccctcctgaaactatccgaaggatagcccacataaggacaatcctggattcagactaaaccagtgttttggctttctccactgcctcttcaattgtaccaacaaagaggaaagctgcttccggaagatcatcatacttaccttcgagaatctctttaaagctgcgcaccgtttctttaaccggaacgtatttacctggaataccgttaaatgcttcagcaacgtggaaaggctgggacaagaaacgttggattttacgagcacggtatacaagcgctctatcttcttcactcaactcgtccatacccaggattgcaatgatatcttgcaattcattgtaacgtgccaagatacgtttaacgccttgagctacgctgtagtgttcttcacctacaacttcaggggacaagatccgggagctggaagccagtggatctaccgcagggtagatacccatctcggaaattttacgctccaagttcgtcgttgcatccaagtgggcaaacgtcgttgcaggagccgggtcagtgtagtcatccgcaggcacgtagatggcctggatggatgttacagaaccttttttcgttgatgtgatacgttcttgcagttgacccatttctgttgccagcgtaggttggtaacctaccgcggaaggcatacgtccaagcaaggcagatacttctgaacccgcttgggtgaaacggaagatattatcgataaagagcaacacgtcacggccttcttcatcacggaagtattccgccatcgtcagacctgtgagggctacacgaagacgtgcgcctggaggctcgttcatttgtccgaagaccattgctgttttgttgataacgccggaatcactcatctcgtgatacaagtcattaccttcacgtgtacgctcaccaacacccgcaaatacggagataccgccgtgctcttgtgcgatgttgttgatcaattcctgaatggtaaccgtcttacctacaccggcaccaccgaagagaccgattttaccacctttagcgtaaggagcaagcaagtcgataactttgattcctgtctccagcatttctgcttgggtagtcagttcatcaaatgcaggtgctgaacggtgaatcgggttcttgtgctcagcagctacggcaccgccagtatcaattgcttcaccgagtacgttaaatacacgacccagtgttgcttctccgacgggtacagagattggtgctcctgtatctaaagcttccataccacgaacaagtccatccgtggaggacatcgcaatacaacgtactcggttgtcacccagatgtctcgaagcttcgagtgtaaggttcacacttacgccgctctcacttactgtagtgatcgtaatggcattgaggatttccggcagaccgccgcgatcaaactcgacgtcaacaaccggacccatgatgctcacaacgcgtcctttgttcatcttaacgttcccctcctacaagcctgctacttttgcaaaaataatgtaccgttcgtttatctttgctctgcaagccttcattaataaaaacagttagccttgtgctgcgttggcacctgccacaatttccgtaatctcctgcgtaatcgccgcttgacgggcacggttataggtcaatgacaattcgttaatcattttggatgcatttttggttgcattacccatcgccgtcattttcgcgcctagctcactcgccttaccgttcaaaagcgcaccatagatcagcgtttccgcgtaacgcggaagcaaaacctccagtacagcctcagcagacggctcgtattcgtagcttgccgttggtccttccgcagcagttacctcaggtgtttccatcggaagaagtttttctaccgtaggaatctgggtcaacgcattcacaaagcggttataacaaatgtacaattcatcaaattcagccagttcaaacccatgaacagcctcgtgtgcgatggatttgatatctgcaaatgaaggcgaatccgacagatccgttgttgtggatgccatcgccatttcacgacgtctgaagtaatcgcgtcctttacgtccaatgacgaacaattcgtagtcatcttgggagttgtggcgctctttgagcgtctgattaacctgacgcaaaacgttcgcattgtatccacctgcaagaccacggtccgatgtaatgatcaggtaagctgtctttttgaccggacggctctccagcatcggatgctgtatgccttgcgtgcttgatgaaatactagctacaacttctttcagtttctccgaataaggacgggctgcttccgctttttcctgcgctttacgcagttttgcagcagctaccatctccattgctttggtgatctgcttggtgctttgtacgcttttaatttgccgcttaatttcgcgcatgccttttgccatgatttcaccaccttaaagttttgacaaagtcaaaactacatcgtaagcacaaccctactttggcaaagccaaagttacttcgtaagcatcaccactagttttgacaaagtcaaaactacatcgtaagcatcatcttttttgacagagtcaaagtattacatgcagacatgcggaatcggttagacaactccgcacctgcagtcatttatttagacagagacagcaaagctctttctgaacttctcaattgcacctttcagtgcattttcgttgtctgcagtcaattctttagtatcacggatggatgcaagaatttccggatgactgctctccatgaaggcaaggaactcaccttcgaaacgagtcacatcacctgtaggaatttcatccaggaatcctttaacggctgtgtacaagctgaccacctgttgttctacggccagaggctggtttacaccttgcttcaggatttccatcatacgtgcaccacgattcaggcgagcctgagtcgctttgtccagatcggaaccaaactgggagaacgcttgaagctcacgatattgagcgaggtcgagacgcagggaacctgcaacctttttcatcgctttgatctgagcagaaccaccgacacgagatacggaaatacctacgttgattgccgggcgttgtccagcattgaacaagtcagcttccaggaagatttgtccgtccgtgatggagattacgttcgttggaatgtatgctgatacgtcggaggcttgtgtttcaatgaacggcagtgcggttaaagaaccaccacccagttcatcattcagcttcgcagcacgctccagcaaacgggagtgcaggtagaagacgtcacccggataagcctcacggcccggtggacgacgaagcaacaaggaaagctcacgatatgcagaggcttgtttggtcaagtcatcatagataaccagaacgtgctcgcctttgtacatgaagtactcacccatcgaacatccggaatacggtgcgatgtacaagagtggtgatggatcggaagctgctgcagttacaacgattgtgtactccattgcgcctttacgacgaagagtttccacaacttgagcaaccgtagactgtttctgaccaatagccacatagatacacttcatgccgctacctttttggttcaggatcgcatcaatcgcgatggatgttttacctgtttgacggtcaccgatgatcaactcacgttgtccacgaccgattggaaccattgcatcaatggctttgatccctgtttgcatcggctcatgaaccgatttacgatccattacgcctggtgctttaccttcaaccggacggaattccgttgtagcgattggccctttgccatctacaggaataccgagcgggttcacaacgcgtccaatcaatgcttcgcctacaggcacttgcatgatttgaccagtacgtttcacttggtcaccttcacgaatatcgtagtaaggtcccaggataacgacaccgacattgctttcttcgacgttcatggcgagtcccataacaccgcttgggaattcaaccaactcgttggacatgacgttctcaagtccgtaaacacgagcgataccatcaccaacctcgataaccgttccaacttcgactacatcgatatcggtcttgtattgttcgatttggctcttaattaatgtactgatttcttctggtttgatactcaagtgtcctcaccccaatctactgtactcgtctgttaaaagactgctcaagacgttcgagcttgccagccaagctgccgtcatagatcgtatcgccaatggcgactttcaatccgcccagcagagtcggatcaacaatgttctcgatacgaatctttttattcacacggccaccgaattgacgggctaccgcttctttttcttcatcattcaacgcataagtggagtagacacgtgcatcagcgatgcccagcgactcaccttggatcttccgataatcattcaacaagtctcccagcaattcaacgcgtccgcgttcaattaacaacaagactgtacgaaggacaggttcggataccttaccatcaagacttgagtgaagcacgttctgcttgacttcatcagagatattaggagatacgataaatttctcgatatctgcatctccggtcaatgcactgactaccgcaaccagttcctgttcaacctcaagtacctgctgttgctgaagagcaacttcgaacaatgctttcgcataacgcttggcaacaatcgtatcgcggctcattgtcggcctcctacctcattgaggtattggttcacaagctcttcttgtgcaggaccgttctcaacttcttttttgatcaacttggatgcaatctgaacggaagctgtacccagttcgctgcgaagtgctgcgactgctttgttcttctcgctctcgatttcgcgtactgcatcgtctttcagacgattagcttcagcttttgcatcagccaaaatcgattcagcttgtttgccacctgtttgtttggactgttcaatgatgtcgtaagcatcttgacgtgcttgttcaagagcttgtttttgttcctccacataggcaatggcctgttcccgagtctgtgcagcctcattcatctgcgtcatcacgagttcacgacgtttttccataatggagaacaaaggcccgaaggcataacggctaagcagccaatataaaattgcaaatgcaacaatcgcaagaagcgtattttcccatatgaaactcaatctgttcactccttcctggaggtatccttgaaacgtcatccgttagaacggacattacctaaaaagaaggcgcggatggctatggccttccccgccaaacctttaaaatttgattaagccataccgtagaacatgaacgcgagtaccacaccgatgatcggcaatacctcgatcaaacctacaccgataaacattgttgtttgaagtgtggattttgcttccggttgacgggcaataccttccaccgttttgctgattaccataccgttaccaatacctgcgccaaacgcgcccagtcctgcaacaattgctgctgcgattaatgccattgctcccatttgtatatcctccttaaaatgataaatcgaattttttattgttcagcctggtgaagaaatcttcgtagggcttgaaacttaatgctcgtcatgcgtctcgatgctctgtgaaatgtacaccatcatcaagataacaaacacaaatgcctggatcgcgccgataaagatactaaagccttgccacaccataagtagcggaatcgctgcaatagcaccaaacactttgaatgtggtcagtttcaggatcgttgcgatcagtacctcacctgcaaagatattcgcgaataaacgcataccatgtgtcaacagcttggatgccgtctcaatcaagttgattggcaagaacaaggcaaatggcttgaagtaatgctggagataccctttggtgttacggaacaatccaagtccatgagatacaaggaacgctacgagagcaagtcccatcgttacagacaagtcggctgttggtgatttccaccaggccagttcaacgtgtgggtgtgcttcagggtccttggcatgcgctttttcaaacgcctccaccgctgtaacaatcggcttaccgaatacctgtgcctgattaacatctgttacctcggatacagccacgagcggaaggccgagcatgttccctacaaaaatgaacataatcatggaaagagcgagagagataaaatgtttacctttcttcatatccattgtactggaaatcagattgcggacgaattctactgcccactccataaaattttgcagcttgccgggattttcaacggataatctccgtgttgccagtacagcgaaaataaaaacaattgcacctgtaactaccagcatcaacagaaccgatagatccagtcgaaatccgccaagcataataattggagcttcatgcatatttttctcacccctttctcgacttgaaagctgcagcccttaacatcattctgctctgcgggaatagacaatccctataatcaataaggaatattgtgcaatgacgagaccgcctgcaaccgcatatgtattgaagtactgcggaaagcgcatcgatatgaatataccgagcacagcgaatgccgctcttgtcaaaaatcccaagttgacacgcttcaagttaccttctgccgcatcatcagacattttccttactttgtagcccaggtaaaatgcattgatccagctaactcctgtacccagggccagtcccaaagcaattgtctccacacgtggcataaaggccgctgcgagaaaacaaatcataagaaagtacatgacgaaaacagtcatcgatctgcggtatctggttagttcactcatcactttcccccatgatttttttcgcgataaagtagatgcttacaccgcctgccgcaagaaaaaagagaacgcttacggcgatccatattccgttacctccgatggtcttgtccaaccaggagccagcgtaatacccggcaacagcgagaatggcaatctcgatcccaaaagctgtcacgagtcccattgctttccatacattatcgtcatggttacgggatgaatttggtttgttcgaatcggccattttccacgccacccttgcaatcccagttaattttactgaatgatgagagcctttgtcaattgaatgattttagcgttttaaagggggaaacgacgggaatacagaccctcaaagcccataaacccgcgtaaaccgtacagtttaactgtatgcttgccctttataaatccgtcagaaaaaatgtattattttttgaattttctgtgaaatgattccggacggtcactatttacaccgaaatgatgcaaaatcgcattgacaattctttccgaagcatgtccatcaccgtatggattggcagcctggctcatgcttgcatacagggttttgtctgtaagcagagctttggtccgttcatacacacgttcctcttcggtacctactaattccagcgttccggcttcaataccttcagggcgttctgttgtatcgcgcaatacgagcacaggcacaccaaacgaaggtgcttcttcctgcaaaccgcctgaatcggtcaaaatcaagtgagtgtgcgggtaaaagttatgcaaatccaccacgtctagtggatcaattaattgaatacggggatgattccccaagatcgcgtgagccggctccttcacagcaggacttggatgcaccgggtacacgatggcaatatcttcgaattcgtcggcaatccgtttgacggcctggaaaatgttgcggtgaggctcgccttgagattcacggcgatgagctgtcatcagcacaaggcgtttgccttgggcccaatcaagtaccgggtgtgtgtagtcctcccgtacagtatattgaaacacatctgttaccgtgttgcctgtgacgtacgtactagactccgatttattttctttggcaagattggaagaagaccaatccgtaggcgcaaagtgtagatcagccagtactcccgtcagctgacggttcatctcttccggatatggagacagcttgttccacgtccgcagccccgcttccacatgtcctacctgaatctgttgcaagaatgctgcatagctcgctacaaaggtagttaatgtatccccgtgaaccagcacaatatccggcttagcttcggctaacaccggctccagacctccaagcacacgaattgtgatttcattcaatgtctgacggtccttcatcacatccagatcataatcgggatgaatgtcgaaaacttcaagtacctgatccaacatctggcgatgctgcgcagttacgcaaacaatagattcaatagactcagggtgtttctgcaattccaaaataagcggagccatcttgatggcttccggacgcaccccgaagatcgtcatgactttaattttgttagacattcgagcaaagccccttttctataagttcatgttcaaaaagtccggttttcagtaccaagaatatggaatgaagctagaaatggagtagcggagcgtagggaaaactacgtgagcaacggacatttcggctgaatttcatattcgatgccgatgatgcccttgggcatccttcgtaatcaaaattggactttttgaacaacctcttacaaagcatgcgatatacttatttagtgccgtatagacggtctcctgcatctccaagccctggaacgatataaccatgatcatccaaacggtcgtccaatgctgctacatagatgtccacatcgggatgtgcatcttgcacagcttttacaccttccggtgctgcaaccaggttcatcattttgatttgggtacagccacgttttttgagcacgtcaatagctgcaattgccgaaccaccggttgccagcatcggatcaattacaatcaattgacgctctgttacgtctgtaggcagtttggtgtagtattctaccggttgcagtgtttccgggtcacggaacagacccacatgtccaacttttgccgctggcaacaatttcacaacgccatccagcattccgagtcctgcgcgcagaatcggcaccagtccgagcatacgtccagagatgactttaccttgtgttgcagctacaggtgtctgtacatcaatcgtttccagttcaacatctcttgtaatctcataagccatcaacgttgctacttcatccaccaattcacgaaaatctttcgtattcgtacgcatgtcgcgtataaacgtcagtttgtgttgaatcaaagggtgatcacatattactaattttcccatctaatttgtccctccggtaagttcttcatgttcagcatttccaaatatacctagccaccattcatgggctcgataaatcctgtatattatatcatcaccaacaacgaattacaccatcaaagggcacccaatcattacagattaccgaatcctataaaaaacaggaccggaaaatgatccatccggtcctgttttgctcctgctgttatgtcgttaagaaaatgaaaatgatgaatacaatggcactccgcctacagaatgatccttcgatcgctgttatccccagattttttttattctcctttttacaagggaaaaatccggggataaaggcgaacgcttcgcttctgcggtctcattctgtctgcttcgtttttttgtatcccattttaagaacatctcaaatacaaacagcatgagcaaagttttttagtatttaagatctgtatagagcgggaattggtctgtcagtgcagtcacttctgcacgggcttcatccagcttcgctgtatcttttggatttttcagcgttttagcaatgatcttaccaatagcgaccatcgcttcttcgttcatgccacgggaagttgcagcaggtgtaccaattcgaataccactcgttacaaacgggcttgtagggtcgaatggaatggcatttttgttcacggtaataccgatggaatcaagcacatgctcagcttccttacctgtgatgttcacactgcgtgtgtcgatcagcatcaagtggttatctgtaccaccagatacgatgttcaatccttcagcgatcagtgtttcagccagaacctgtgcgtttttcacaacgttctgggcatatgttttgaacgaaggttgcaaagcttctccgaatgctactgctttggaagcgatcacgtgcatcagaggtccaccttgggaaccagggaatacggctttatcaatcgctgctgcccacgctttgcggcacagaatcataccaccacgaggtccacgcagcgttttgtgtgtagttgttgttacgaaatgcgcatgtggaaccgggtttggatgcaaacccgcagcaaccagtcctgcgatgtgagccatgtccaccatgaacaaagcgcctacatcattggcgatagaagctagcttttcaaaatcaatggtacgcggatatgcacttgcacctgcaacgatcaaacgaggacggtgtttgaaagccgctttgcgtacttcatcataatcaatcaggaatgtatcttcctgtacgccgtatgccacaaagttgtacagcaaaccagatgcgttaaccgggctaccatgtgtgaggtgtccaccatgggcaaggttcataccaagtacagtatcaccaggtttcaacgctgcaagataaactgccatgttcgcttgtgcaccggagtgaggttgaacattcacgtgttctgctccgaacaattcttttgcacgatcacgcgcgatgtcttcaacgatgtccacatgctcacaaccgccatagtaacgtttacctggatatccttcagcgtacttgttggtcagaacagatcccattgcttcgattactgcttcacttacgatgttctcggatgcgatcagttcgatgttgttctgttgacgtttcagttcaagattcatcgcttccagtactgccgggtcattcttgcgcaattgttccatgattaaattcctcccaggtataagtgaagttataaagtgaaactaatgtttacacgaaaacggcgagtgcaacaccaatctgaagaaacgaagtggtcgcctaaaagctttctttagaaagctactccggaagcataggctatcaccggatttccccttttaaatagggaattaaaaaatctggggataacagcgatcggaagatggtgatgcaatcaaagtcaggagtgtaacccaattagtctcgctttatatgttagtcacaaaatgtcgaatctggttgttcttccatacgatacaccgcgcgttcgccgccaatcaacttcggacgggtcaacgctgtggttacacgagcatctccaacatagcgaagcgctgtacgatagggtacggctacatgccggagatgcatcccaatcatcgtctccccaatgtccagtcccgcatgggcctgcacatgttcagccaggcatggatcggtcagcgaacgatatgctgcggatgccattgaacctccggccttgggcacgggtactgcaccaacctcggtcaatccaagtcgagtaagcacagaacgttccattaccagcgcacggttcagatgctcacaacattggaataccgtgtcaaaaccgaactcctcctgcacctcgcgtatacccgcaagaagctgctgcgccacttcaatggcaccactcgtaccaatccgagcgcctgcgacttcacttgtgcttgtaccgatcacaacgatctgtccaggcccaagctgtccggcaagcgccagttcatgcagaatagacgcggtctgttcctgcaatccgggttgttccgaatctaactctatagtcatcctatcatcgcctcccgataaaatcatgcccgctgtctcttagctgtccttcgtattcttgcacggcatctcaggtactattatagcgaataatcagatgaaagacgaaaaaaagagcagtctgcgggtaacgcagaattgctcttttgcccaggcgaccggccgtttgttccggtgctccatcgtggttatgcccacttcgtcgccagttacaccggatccctgttttccccttcatcataaaacaacccgcgtctaaaatcaacggttaatttacatcacgtgtcctatttctataacctgccccgcaggatcagaattatcccagcttatccaaaagccggtccaatgccgtccgaatctcagctgcagctatattgtaatcatcacgacttcccccaaacggatcggagatgtcgaaacttggaattcgttgtctaatctcaatggctcgctcacgctccgatgccaggatctcttgcccaagggcacgtttcatctcaagcgttgcaaacaggctgtccaactcctgaacatcacttaatacctgttcatcatcctccacatattctttcaatgtataagttttgtggactgaatcgggaaaaacctgcatgacatgttgcttatgactccgtgttaacgtaagaaccagatcggcccaacctaccaggttagagctaagctgtgtggaatgaggtggaccttcaacgttatgatctctcaaaaccgcttcagcatgtcgggaaatcggcatacccgacgttgctgccacccctgcggagcgaacctctacctgaatgccgcgctccgatgccagttttcgcaaaagcccctctgccatggggctgcggcacgtatttcctgtacatacgaataaaatatgtttcattgtgttagcctccccattttacatatgatgcgaatgatatgatatctcaagttttattctaaaatataaacaaaagtccaaacgcaagcaagattgcgccaccaatggcttcgccgtaatccccgagattctggctcacccgacggcctaatagcagacccataaccgacatcaccccgccacacacaccgaaagcaagtacagttaagatcagatcactgctgaacatccctaaggatacgccaacggagaatgaatccacacttacgctgagggagaacaaaacaacgccgagcagggaacggtggtccaccagctttgtatcgccttcacggaatgcattcagaatcatatgagcacccagcaaaacaagcaatccacctgccgcatacgtcgtaatgtcaccgagcagggagctaacgtatttgcccatatacatgccgatgagcggcatgatgatatgaaatagcgccgttacaatactgattcgcaatacatcccgcagccgaatgcccttcatgccaattccgatcccgagtgagaacgcatcgaggccaagcgcaatagccatgatcaaaatggttaccaactgccctacatgggcagacacatcccacatccccatacccccaagtcacgtaaaggttcttgtacacgatatgcggacaaggacctaaacatgaccgatgaaaggcaaacggcgacggatgtctggtcagttgctggctttatagaatcttgattttgttttggaaaaagagtgattactctcctgactgtatgatcaggagaggttatgagggttgctggttgccaacttgtatgagttggttccccgcagccttgagcagccgattcatgacggctgctcccagcccttcgcgtgagcaggcttcagccacaatatatgtggcgccttgctcatcgcagctgcgcagcgcggcgtatagccggcgcgctgcttcttccagctcgctggcgtcacccagcgagaacacggcatcggcgcggtactgctccgcgtgctcggcgaacgccagcacagcggtgcgctctccgcgctgcgccgcctctgcgagggcggcgctgatccaggccgccaccgctgcgggcggcccctccaccacgcacagcgcccctgcgggtgcatagtgcgagtacttcatgcccggcgagcgcggcgccgggctgcccacgccatcggccccctccgcgagtagcgcggggtccgtggtgacacgggcggcaacggcggacagttgttccgccgtaatgccgccagggcgcaggatggtgacgctaccgtcgtcaccgacctgcacaaccgtggactcgacgcccaccccggtggggccgccgtccacaatgccgccgatgcggccatccagatcctcgcgcacatgagacgcgagtgtggggcttggccgcccggagcggttggcgcttggcgcagctacagggcatgccgccgccgcgatcaactgcaaggccaccggatggtccggcatgcgcacggccaccgtgtccagaccggcggtgacacgcggggataccgcacccggcctaaccggcagcaccagcgtcagtggtcctggccagaaggccgccatcagcgcttccgccgtttcattcacttccgtgaccagcgcatccaactggtcacggtgggcgatatgcacaatcagtggattgtcggaaggtcggcctttggcgacaaatacagcctccacggctgctgtgctacgcgcatcagcacccaagccatagaccgtctcggtcggaaaggccaccgtctgaccttgacgaatgcaggctgcggcagcctgcaagtcggcgagcgcctgttgatcggcgctcccctttttcacatccaataattcaatattacccaatccgtgatcgttctcagcgctcaccaagacacgtacatcccacatctcggtgaccagctctcccggagctttcatatcacgttcttctctaccatccctcatctcagaggtgtgttgcactggttcgttttctctgctcatatatcatcattcctaaacttcaagtaggttagttcatatccatattcaatataagaggttgttcaaaaagtacgcttttgattacgatagatgcctagcggcatcatcaacgtcgaatatgaaattcagccgaaataagcgggaggcttacgaagtatttttccgaagaaaacattttggttgctcacgtaattttcctacgctccgctactccattccatcttcttggtactgaaaaaccagactttttgaacacgcactataagtaattataacatacctgtcccaactcggatgcccttcatacttcgctcggaatttcaccactaattcatattaaaagggcagctccctgaatcgaagtcgccctctactgtattataaatacgttgttatgcgaacaatctagttacccaactccatagtttcacagccatatcccacagaaagaatctcgcttccggtgtgtctccctgcacagatgcctctgcatctcctggttcagccgctgcggctgataccgttgaaggtttcgccagtgcatccccggtccctgcatcaatgaagcacaacggcgggaacaacacacaccaccagttctgacctttgccttcccccagcgtgatccgaaccgcttcataatctccggcaggatagacggtacccccatacagcttggtcgggaacggaacggaacccagctccacctgatactcataatttaaaccgcgactggccaactcttctcctactctattctcaatctcggacaaatgctcacgaataaccttgcgcgcttcatccagactttgcggattctccagttcggctacccactcgcccatctgagcaacgaccgcatcccgaatctcgcgtttcaccaattgatctcccggtgcatccgagtttgctagaatacgcaagcgaatcgattgttctggaattgctgtggccgccacagctgcatccgttttctgaccttcccacatcatgataatcaacataagacatacaataataagtccaatttgctttacaattcttctgctcattccgttctccccctcggctctctgatcacgttgcctgcaactctctcatgtctatcagtatgcccggtagagacggaagtaaacctagcatttgcaataaatctactaaatcgtttctatgatttacactttctcacctatcatgttaaaaaggctgatctgcacctggttacagggcaaatcaacctctttatttctatgaacgatcactttatacgtcacaccgctttacttttcactacaccgactcaacagttacacagcacttttctctttcttgagcatattccataaacgttccgacaaccggggttgctgctctcccatcagaagttcatcctcctcttcttgcccgtacaacttaatgctcatgactacaccgatgcaagccatatttataagcaaagaggtgccgccgtaactgatgaacggtaacgtaatacctgtgagtggcatcagtccgaggaacgcccccacgttttcaaacacctgatacaacaacattccgataatacctacaatgatgacgggtcccgcgcgatctctgcatgccagagcaatcagcaccatgcggtggatcaggataaagtacaacagaatcagtacggatgcaccaacaaacccaaactcctctgcgatcacaacaaaaatggaatcagaatacgtataggggactcgtccactctgaacggatgttccttgcaaataacctttgccgatgatgccccctgaaccgatggctaaacctgcatttttcgtatgccaggaagcctttgaggtagccttttctggtacaagccagggatcaattcgctccgcccaatgctcacgttttatcttttcaagaaaagtgaaaacttcaccatggtagaaggtataggctttaacaaaaccaaagaacgccactcccacaatcgccagtgtaatcaatgcgtgcttcagcctcatatttccgatccagaataccgcagccaaaatcaccacataccccagcgcattccccaaatcattctgagccataacaagggcaaacggaataaacgcccaacagccaatcggcacaatatctctccaaaatttcagcgtgcctcgttgtctcttcacgatcaaatgggcgagaaatagaatcagaatcatcttgaacagctctgccggttgaaaagaaaagttctcgcccagcttcagccaaccgttggcgttattgattgaacttcccaggacattggccaggatcagtagtatgatccccaagccatacaaataaaacgcatatttcacgtataacttgtaattcacaagcccgatcacaagcaccgcaatgaacccggccacatagaaatacatcgttttgacatgatgattcgccagattggcatctgtctgcgttccgctataaatcgcaaatacactaataatcatgagtaacagcattacaaaaagaataacaccgtccatctttttcaacattctcaacatgactctgtccatccccctgaaatctagcattctatgatttccaattgaactcaatattaccattgtatataattggataataaaatggaaatcagggtcgtttcaggttaaaaaacgaactattcaacggcctgaattacgccgtaaaaacaataaaaaccccaaaacatccacccaatgtaacttgggttggtctgttccagggttctatagttatctagcttatatacataaatctgacgtgctatttcacggtttgactcagaaacgttattgctcctgctgggatggcttgcgtcttagcaatttcctcaccagatccgtaatactcggttgttccgcagagccaagaatatcctcattctcttccgtgtggaccttaatactcatcacaagacccatgctgatcatgttgatcataatggaggtaccacccgaactgataaacggcagcgtaatccctgtcaacggcatcagaccaatgaatggaccaatattaacaaagatctggtaaagcagcatcgctatgatcccaacaatgagataaggccccgcgcgatccttacactccagtgcaatcagcaccagcctgtgaatcaggataaagtacaggagaagcagtaccgaggcaccgatgaaaccaaattcttccccaatctgcacaaagatggagtcagcataggccagcggcacccgatttgactgaatcgttgtgccttccatataacctttgcctgtaatcccaccagaaccaattgcaagctttgcattatacgtctgccagagtacatctcttgaggtcagctctggtacaagccaaggatcaaaacgatccgcccagtgcgaacgtccaatgtcattcaggaatttaacaatctcatcatggtaatgaatatacgcctgtgtaccaccgataaaagcagccactgcgatcataaagccaatgagggcatgcgtaaatttaatgttaccaatccacagtaggcccacaagaatgactatatagcttaacgcatttcccaagtcattttgaagcaatacgagtagtaacggcggcagaacacagagtgtaatcgggataacgtcacgtccaaaatagagcggacggttcttctttcgggccaaaaaggccgataaaaacacaatcaggcataacttgaacaattcagcaggttgcaaactgaccccgaagatggacagccaaccttttgcaccataatactccttaccaaagaacataacgaatatgagcaggagcatccccacgccatagatatataaataatttttgattatgaatttatagttgatcatcgacatcccaaaaaagactacgaagcccaaaatataaaagatcactgcgcttttcgggagtccctccagctttggacgaccaaacgttgtactgtaaatcgataaaatactgatacccatcagaataacgagtataaagacaatagaatagtctatctttttaaatttgtgcagcatgtaattatgttcccccaagcattcagaaatcttcggtatatctcattgtagaggatttcacggcaaaaagaaaacccgcagaaccttacattttcgtcacctgttccgaagtacgaacacccaggacatgccgctcgattccggcaaggtccggtacaatgataatttccggccaatgtcccgccgtttcaagcaaagctgcaatgtcgcgagcctgcccttggcccagctcaaaaccaatgatctgcggcggcgcaggcaacagcgccaactgctccagcatgatacggtacggtgcaagcccgtccggaccgccgtccaatgccatgcgcggctcatgatcgcgcacctcttgctgtaacccggcgatatcagccgccgggatgtatggcgggttggacacaaggatgtccacccgtgccccggcgaacggggccaggagatcgccttcacggaagtcgatctgtaccccgttcgcggccgcgttccgcgcggccacttgcagggcagccgccgagagatccccggcgccaacctgccagcgcgggcgcagtgaagccatcgtcaccgcgatggcgccactgcccgtgccgatatcgacggcgagcggagcgccgtcgggaaacacgcggtcggcttcgcgtagcacagcctcgaccaacagctcggtctccggccgcggaatcagcacggccggcgtgacctcgaacggcagcccataaaattcctggctgccgataatgtattgcgccggctcacccgcagccttgcgcgtgacggcgtcctcccagctgctgcgatgctcgctgggaaaaggctccggctgcatcatgtaatacgcggcgccataaacgccgagtacatgttccaacagcagccgggcattgttttgcggctcatacacgccgcacttctccaaaaaagaggaagcctcaacgaaggcttcccgacagctctgttccggcgtcatgacaaactgcgcgcgggtcacagattattctcctctatccatcaactcggtctgctgagcaatcgtcagtgcagacaagatatcttcaatctccccgttcatgatctgatccagcttgtgcatcgtcagaccgatacggtgatccgtcacacggctttgcgggaagttgtacgtacgaatacgctcactacggtcgcccgttcccactttacttttccgctcaacagagatctttgcttcctcttccatacgtttcatatcgaaaatacgtgtacgcagaacctgcaacgctttttccttgttggagttctgtgattttccatcctgacatgtcgccacaattcccgttggaacgtgcgttacccgtactgcggatttcgtcgtattaaccgattgtccaccggcaccactggaacagaacgtatcaacacggatgtctttgtcatgaatttcaatatcaaaatcttcggcttcaggcataaccgcaaccgttgaagttgacgtatgaatacgtccgccggattcagttgttggaatacgctgcacacggtgtgcgccgctttcgtatttcattttgctgtaagcgccacgtccgttgatcaggaaaacaacctctttgaatccaccgagatcatttgtgttaacgtccatcagctctacacgccagccttgtgcatctgcataacgtgtgtacatccgatacagatctgctgcaaacaacgctgcttcatctccaccagctgctccgcgaatctcaacaataacgtttttgtcgtcattcggatcttttggcagcatgagtacacgaatcaattcgtccaattccttctggcgagtgctcagttcgtcaatttccattttgaccatttcgcgcatctcatcatccagtttctcaccctgcatttccttggcagcttcgagatcctgacttacctgtttgtattcattgtacgcttcataagttggttgcagatcggattgttctttggagtattcccgcaactttttgttgtcacttgccacatccgggtcacacaaaagctcgctcaacttgtcataacggtcggctaacgcctgtaatttatccaacatgtatagtcacctcacacattattttgtccatgcaaatatcgtttttaataattatttcggtttcattattcataacatctataatctatattccacaacgcacaggattctcaccgaatcccctgactgcagcatgtattcacattcctgtatgatcgacgtataacatcgctacaacgtcatcaaatcctttacttttaaagtgaaatcaagaaatcgcgtaccctgtatgaaactcgcttaagctcatctgttcaagcgcgaattttaacgtggtatacgactcttaattatagcatattcttatggttctgaatagtaactgttccgcatgcggatgaactaatttttggtgctgcgaaatacaaaatgaaattgttgttcgatgttgttccgaaatgtaaaataaacaaaagccacgatgcgctaacatcgtgacttctctaacaaaggccggtgggcgaccacggcgaatttcaatcaaacgaatgaaaaaccaccggattgcaaggcgaccaacctaatcccaatgttttttcttgttcctcatctgcaaaactctaagtcaaagaccccacgaacttcacgagaaggtcgcagggtcatgttattgaatctacatataaacgtgtaacaacctatacgttgaaacggaagtgcataacgtcaccgtcatttacaacgtactctttaccttcaagacgaagttgtccgcgctctttggcaccgttcatggaacccgctgcaaccagatcgtcgtaggaaacaacttctgcacggatgaatccacgttcgaagtcggtgtgaatgactcccgctgcgccaggcgctttggtacctttgcggattgtccacgcacgaacttcctgtacacctgctgtgaagtatgtgtatagaccgagcaatttgtaagccgctttgatcaacaggttcagaccggaatcctcgataccgagttcttccaggaacatttgtttatcttcgccttccagctcagagatctcttcttcaacctttgcactgattggcaccacttctgcgttctcagcagctgcgaattctcttactttttgcacgtaagcattgttcgccacgtcgccgatttcgtcctcagctacattggctgcgtacagaacaggcttcagggtaagcaagtgcagatcgcgcacgatcagaagctcgtcatccgtaagttccatgctgcgtgccggcttgtcatcgtacagaacagccttcactctctccaatacttctacttcttgagaggcagtcttgttgccccccttcatgtttttcttggagcgatcgattttcttctcaacactctcgatatcggccaggatcagctccagattgattgtctggatgtcgcttaccgggtcaattttgccatcgacgtgtgtaatgttctcatctacaaagcaacgtaccacgtgtacaatcgcatctacctcacgaatgtgggcaaggaacttgttaccgagaccttcgcctttgctcgcaccgcgaacaagaccagcgatatctacaaactcaaacgccgttggtactgttttcttaggtacaacgagttctgtcagtttgtccaaacgctcatctggtacttcaacgatccccacgttagggtcaattgtacagaacggatagtttgccgattcggcacctgcttgtgtaattgcattaaacaatgtagatttaccaacgttaggcaaacccacgattccagctttcaaagccatgtatatgacaactcctcattgattacttgttcggtatggataatcctatacattatatatgacaaacctcaaggcatcaaggaacttcgccaattcgaccagagtcccttccgcttcccgaaatccccagttaatgcggataattcgttttgcgcagatcttaagttttgcctagattatccgctattaggtttaccctttgatttgcttgtacatggttagatccgttacctcatatcccatcttgcgatataggctgctcgcccgcacattatgtccaaagacatgcaaaccaatgcgatccacgccaagactcaaggccgtctgttcaagcgcctgcattgtctctgttccgtatcccttaccacggtgcgcttcttcaaccacgatatccagcaaaaaagcatcttttccacgacgattatccgtgatattaaaccagatataccctacattgccgtccacagggtgcaccagattgtagagatatgatccgggtgtattcaagccttctggcagataacgttcataagattcctccgccagttgctgtgcctcttcctcagcccaggtgcccgcttctactttttcttctgcaaaatccttaatcgatcgaatgcaaaagctcgcataatcttcctgattcattggagaaagtttcacctttttcccctccttatttcgagtgatcttaattatgtatgatctctgtgcaattcttcttgcactactatatcgtattgtatcttgttatcccgcttagcgcatgaagttattctgacgattcggatttcaattttcatattatccattttgtttataactattaatctctttgaaccgtttatacctcatgaaggaaaggagtgaatcatattgaacacacgtcgccgattctccaaaaagaaaatgattatcttgtctgttatcatactcggaatcgccatcgtcgcttttatgagctttctgaatgcaatggatccctttcgccacttaaggatcacgatccacaatcagtccgactatgacctcaccaatattcaggctagcctggttcaaggcgacaactcgtttaacaacaacgagagtggctccacctacgtattcgacaaggatattcccagcggagcaaacgtgaaattcgccccgcagctgaaactttccggggagggggtcgtctccttggcgttcacggacagtcgcggaaaaacctataacaaaatggtctgcggttatacggaatacttgtccggcaattcctacgtcactgtaaccaatgagaatatcagcgtgaaagaggaatgtatgtaaaacagtagatcagtcaatcatcaaataaacatgcaatctccctttaggaagattgcatgttagggtcctattttatttcaacatcgtttatcaccgttaaaagttagtaaaaagatcattacgggccttttacttcttgctgtgcaataggttatagattatcattgcagcctcctgtcgggttagctgctttttaggcataaacttccgatcggggtatcctttcataacagattcttgagttacaagactgatactatttctagcccaattggagatcatttggttgtcatcgtaaagtgtgaatgatgataatacataaccttgttttttcattacgttctcaatcatacttgatgcttcttctctcgtaacgtccacattcggtctaagcgaaccatcactgaatcctttaagtataccttgttgtaatgcaggagttatctccgaatagtaccaagagttagattgaacatcgttgaattcattaatataaggaaccacagaattatatccaagggctcgttttaagaagattgcaaattcggctctcgtcactttttgatgtccaccaaacgaaccatcggaatagcctttgacaattcccttctgtgccaagtagataatagcctccttcgcataactcttttctatatctctaaaagtaacacttgctggatttttcacttctccatttgaacccacaacttgagtatcaattgtaatgctgtcgtttttccccgtaaccgcactagggatagggatattattaacattatggtaaggaggaataggataattatatccatataccgttgcaccacttccatctgctggagttgttacagcaaccgtctgcttgccaatgacctcttctgatccatcaggtctgacacgaacagcgatgacattatactcataatatttatttcgttcgacgcccacttcactaaactgcaacttaccgttcacagcagtcaccataccctcatcacgtgtttctccagtggcagtattcaaatacgtcttacgataaacaccgtttcctagaggttcgtacttcgtttgtggattacgttcaacgtaatgaactgctccttcaataggttgatattcaaaggcaatcgttgcgttcgaggcattcattggagccacattcatcggttgaggtatgcccgccgtctgcacttcgattgtactagattcaacctttccgtatttgttactcgctacaacccgataggtatatgttcttcctggctggagcgtgtacgctatcatcgtatttgaatgacctgaccatactttactcacttgatcctggtagatctcatactgggttgcgccctctaccagattccattgcaggtccactctattatcgtacactcgattgactctgatgttaatttggcctttcggtgccacgtcctcagtcaccttaggtatcttcacacttttaactgcaggaggaccttcattgtctccgtcccggccaatcactttatagatgtatgtggtgtcaggtgtaacattcccatcctcgtatgaggttgacttagtgatcgccaaaggctgatcattacgagtaatcacatactctacggcatggtccgccttactccacgtaagtctaactttgctggaatccagtgcttcagctcggaaatctggtggatatggaatatgaggtacatttccgatggtgtatttcgtttcctcactgtaaatttcgcctttgcgagctactaatgtatacgtagtgacagcattaaaattcacaccttcgtctatatattctacaagcggaccctcataaaggattatggaaccacgcttgagtatatattgttcagcaccttccacagcgtaccacttcaactgaataccattgttaccgccaggacccgagtagtaatatctaggtttgtcaagttttgtgatcaccggctccccgtcagctagggtcggaataacgtaaggatcttcaggagtcccctgtcctttaaattccacattattttttaagaaggctttatatttgaagttttgtaccgcgctgcctgctgcaacagagtttatatgattatttgggaatgcatcagatccagtggctatctccgtaaaaacaggccccttattaccatgttttgcattttcatatgtattaggattagccaaagccaggctggatatcatctgattcggacgattaggatcatttagaacaacccctgtatatttctctaaatcctccttggtaacgatccctacaggagatgaatagccattaacgtactcccctgtatcaaacgcattgacattccaccatagcgtgttaaaaggagactgcttgtcttctttaattttatttagttcatagcccacactatctgcgaacttggaatacaggtctactctccatctagcactatcaccttgtgtatcaatatatttagaaacggtattctgagagattaaggtttgattatccacgaggtaccatttaccgtattgcttaagatcaacgactgatccaaaccccgccttggaaactcctaaagtataagcatcctttgcaggaggcgtaataataaactccactgagtcttgagtggagcctgtaggattcgtccaagctaacttgatcacatttttctcaccttgtttcaaaccattaatgagagcacttgagctggattggctgttcagatcagtatttttcacgtcattgacgtacacctctgcctgtacattggcatcttgcttgtaaaacagactgatcgcattgccattcataagcccccagtttacataagtgaaagcgccatttacatcttctaactcacctgaaagtttccccgtaaaatcaattctacccacatcatcgtaaattggcgcaggtcccttcaatctaacgaagagtaactcttgttctccgtatttttctccgtcataagcgagaactccgatcctatatgttttatctggtgcaactcttgttattgtgtacgttcttatatttttatccatagcaacttctcgattgaaagtaacagcatatttagttgctccgggaacttcatcccaagacaacgttatggagtcctccgttgtggttaccgttacgttaggtttcggcaaatatgacgtagtaatagtgtcacttattgtttccattgatgtaaacgtactagtggtgttggaattatacgagtctataaagttatcattcgacttggaagactccgtagttattttatctgtacgaggctcataattcgcatgagctacttctgtccctcctcctgaaatcagtatactaaccaacaataaattaataactagcatgaaaattaatacgttcttgaacttcatgttatgtatcacctcttagaaattatcgtaaatcaatcaatccatccttcccttagttgtaagtgagtctttttgcctagaaaaggcattaaaaaccattccttaagactcatcaatcataatgtgtaatgtattaacaaacaataaaaaattttactctgaattaaatcttcatcttgttatacattacaaaaaagcatgccgttgattatcgacatgctaaaagtaatacatcaatattaatcaattgacttgtcgcacttcaaagttgaagtgccaagtccattcaatgaacatttccacgttttcctcacagtctaacgaacccaagagacactattcagcatttttcctacgttttgaaaatctaacgaactatagactcgttatttactctttctttggcgtcatccgctgcaaatcgcagttttctatctcattagcgtgtgtgagattcgttaaattcccaactaacgcctaaatcgccatataaggtgttacaaggttcgttagcggaatttgctccatcagacccagcgcatactctcacaagtcaaagctgttcagcaagacgtcacctctggttttatctaacgccgttccaccagacgtgatgtctgcttcagatcctcaatccgacctgcgccaatgccaaacatcacggtacgcagctcgaattcgacctgttccagacgctcattcagcgcatcatccgaagcgactgcagattcaagaagagatcggccaaaaccagcgagatccgcaccgagcgcgagggctttggccgcgtctacgcccgtgtacagtccaccactaccaataagtgcacccgctggattcagcgctcgtacttcctgaatacactctgctgtgggaatgccccagtcggcaaaagcttccgctgccgcccggcgtaccgggttattgttgcggtacttctctacctgtacccagcttgtacctccagccccggctacatcgatgaatgcgacacccgcttcatataggcgttgagccgtcacgccatcgatgccaaaacctacttcttttacgccaacaggtacgtctagctcacgacacaagttttcaatccgctgaaataatccgctgaagttggtgttaccttccggctggaaaacttcctgcaacgtgtttaggtgaagcacgagcatgtccgcacccgcaatatctacggcgcgctggaagtcagccgtggtgaacccatagttcagctgcaccgcgcccaggttggcaatgaccgggatgtccggtgcccagcgccgcacatcgaaggtacttgccagttccggctgctccacggcagcccggatcgaacctacgccgagcgcccagcctctggcgtttgctactcgggcgaggcgctcattgatggcgcccgttgttttgcttccacccgtcatcgaactgatgagcaagggtgtacgtacttttttgccaataaacgaagtctccagatgcacctcttcaaaatccagttccggcagtgggtgatggcgaaacgcaaaccgctccataccgctggttaccccttctcctgccacattctcctcaagacagaggcgcacgtgctccagcttccgttctcccgtagccacttcgggaagcagccgttcgccggctcgctcttgttcattcatgatgagacctcctatgtgagaatcgtgcggatcgacaggataacctgcccgttccttacttctatgtatatacgtcttttgcaaaatacaaaaacattaatcctataagcattgcagctcagcagtttaactctatccagtataacgttccaaaccatctattgaaaggatgccccgacaccaaaatctcagttaaatctcggagcaccactatctcatacctactcaacagcacggatcatccgtagcagcttcaaagttaattagcagagacgatacacacgcacatggatcaacaaaacacattttcactccatcatctgcacaacaaacttatctcaaaatttccgatgccaattgctccccaacaagctgtccggacaacgtcactatcggggttccgccgcctggatgtgtcgttccgccgacgtaccagagtccttgtacatctttgcttcggttgcctggtcgcataaaggtctgcttcaccgagttggacgagatgccgtagatcgacccttgatgcgccaaggtatcccgttcgatatctcgcggtgtgtaccggatcagcacatcggattcattcaacccggtaattccccgcgccgccaattgttccagcacaaacgctccgtaacgttccgtctgttgctcccaattccatgaatccgacaaatagggggcattgaccagaatgaacagattactggctcccgccggagccatgcccgcttccgaataaccggaataacagatgtagatcgtgggatcggcgggcattttacggtcacggaaaatatggtcaaactccggttcataccgttccgggaaaaagaccgtatggtgtaacaacgcatcatattgtcttcgcacacctgccagcgtcacaaatcccgaaatggatggttcatacttccgtatgcgggcatcgctcatctctttccgatgttccggtgcgagcagcagtcgatttatgctaagtacatctccattggcaaccacctgatcggcttcccggaagccttgatccgtatccacacctgccactttgccattccgaacaacaatctgccggacctctgtgccggtaatgatctgtacacctttttcccgtgccagccgggtcattccttcgatcagttgataggttccacctttaaccccgtagatgcccacctctgcttccacatgacccatcatggcaaagatagaaggcgattgatacggcgatgatcccacataggtcgcgtaacgtccgaacatagccagcgtatgcggatgttggaaatacgagcgcagtaacttatccagcttcaccgttggccgcacgcggagcaagctgcgcagcatttggagattgtatttgtcagaaggagacagcagcaacttacccagaaaatgacgattggcttccgcatacagtgcagcagactcatccataaatgcatcataacgagctgcatcctctggactgtacgcagcgatctgctccttcatccacccgcgattacctgacaaatctaccactgtgccatctgcaaatatattacgcgtgcgcggctctaactcatataactgtacgtaatcttccattgctactccagcatggtcgaagactgaacgaaaggtcgatggcatcgtgatcgtgctcggtccccggtcaaaatgatacccgtcccgctcaatctgctgtagcttgccacctacgtgttgctgctgttccagaatggtcacctgcacaccttgtgaagccagtcgtattgcacacgacagacctccaaatcctgcaccgattataatgacgttacctctcaactgtaccgcctacctttccatacataccccttgccggagcggcctgcctgccaggaagcgaatccgatggcaatgacacaggccatgctgactggttgcagaagggcaagccaccagggttgtccgccagtatgatccgctactcttttcacagccatacctaataaagttcctattaatccatacagaatggacaccgaactacccgtcatgagtccaataatcaagcccaggggaggcacaatatacatcagtgtatacatcaacatcgtgcccagcagcagtacgtctttacgtcccataccttcgtacatatttttcttgtatccattccatacttctgcaccgttctgatacatgcgggtattcgttacatcatgcacatcggtcagcatcaccggatgacctgcacgcttgactgctttggcgagactcatatcatccactagatgtgcctgaatggcagcatgaccaccggaagcttcgtaactggagcgatgaatcagcaaaaaagcccccgtagcggccacaaacatcggactggatgatctgcgtatcatgaaaatgggcagatgactgatgacggtgaagaccatcatgggtacaacaagcttttccatccacgtcttcgttacctgataaggaaaaccggttaccagacccccgctttgctcacaccctgccgcaagagtctgccgaatggcacttggctccagacgcacatccgcatccacgaacatataccattctcccttggcctcctgaaccagcctgtgacacgcatgggatttccccatccagccctcgggaagatcaacaccatgcagtagacgcacacgtgcatcgcgatccgcaatcgcttgtaccatagccgctgtctcatcttcggagcgatcatccagcaccaatacttccatccggaatcctgttgtatcactcgcgagtacactttcaagacatccttcgatatgtagtctttcatttctggctggaatcagtaccgagacgagcaggtctggtggttgtatcttgtctgcccggaatgaacgtactttgggcagacaggagacattccatagagcgaacagcaactgtatgcccaatatgcaggtaagcacaatccagaagatttcagatgcattcatgctaacggttcacccgctttcgcgtggcatcgtatttttcacttgtcgaacgtacatgacgaatcagtggaatcgcatctggcaaacttccctgccccatccgtataagctctgatctatgatcgtctaactgctgttccagcacatggccgagtctggcggcaatctcttcactcttcaacgccttccagtcttccatcacagctgggcccgcctgcatcgatatttccggtagatcatgctggaccatcccatggcacaaggttaccggtacagcaatggcatttggagaacgacgaagtaacaatccgatgcctggacggaactgaatcggtctggcctcctgatgcagaatttctccttggggaaaaatccagacccttttgcccgaattcaacagctcactggtgtactgtagagaagtccgaataccggacgcactctccttattgatcgaatacgcacccaatttacgaaaaaaagcatattgctgaagctgttgctcctccatcatcacataatgatcaccccgcgatgtctgcctggccgcatgatagagcagcagaccatcccaccaggagctgtgattcatgaaatagatcaccggacgagtcggttcaatcggggagttgtccctgatgtccacctgcgggtccagtgaccctgtgagcgtgaaggagcggaagcgccgacgtagcagataatagtgattgtataaggcaaaaatacgattaaacggttttgattttacggcgcgaatcatagagccagctcccttcggcaagaagcacaccagcaatggcgatgataaaactgcctgtaatcccttcctttagagcaagcaggccgaacagaagaataaacagctgatacaaccattttgcacgcagcaatgagctacggtcattaggcatggccggaaggaaatgggataagaatgcacccatgataaaccagcttatgtaattggtccacggaacaccgtagaatccacctggggcttgccactcccagaatcctcttgcatgtgcaacagggtcgagcaccagatcaagtacaatcgcccagaacccggttttcactgctcgaagcaatttgccagtccacgttgaaccaccgccacttaacagcgccgagttacccaccactgcgatccaggcgaaacccagcgtaactggcacactgaacagatgaatcccgaagaagtctgagtaagcatactcaccaaatggccaatgcgtatgcactcctacccactctacgcccatacctccaagccagataatcacagaggatatccagagtccgggtttcagccagatgactgactggtcggacaggcctgtccgattacgcccttgatagatcagatccagcacatacaatgcgtagaagattagaaataaaccatttgaaaaagataatacgtcaggcacaccgatcgttagcatcaaggttgctccaatgacataccacgcccagtaaagccactggatcatcaggataccgccgttcgggaggcttgataggccagcatcgggtaacgtttcacaatcgcacccagcatctccagtttcaattcatcgctaacatatgcccgtttggtatatacgtcataatcgttgcgttcaaccgcgtgtagaatggtggagtaaaaggctgctgccagctcgatggaaaacgcactttccgttgggtacgtatccagacgatccatgccaatacggaaccagttcaatgctgcagcttttaattcatgaacaatggcaataaaacgttcgtccacgactccgtcttcaaagtcctgctcagtgtaaccatgtttctccatgatctccagcggaacataccgacgcactctggcccgatcttcaccaacatcccgaataatattaacgatctgcatccctttacccaaagcaatcccgttcatggctacttccgcgccgttatcatcccgcaatacaggcaacaacatctcgcctacggttccggccaccagataacaataatgctccagttcctgcatcgttgtataatgcgttactttaagatctgtgagctgcccttccatctgacggaaaaatggccccttatccagatgaggaaaactgctgaacaaccatctcagtgctggccagataaaatgtccttccgcgtcgtccaactgatcaaacaaatcatggatttcgtgaatcgtatagggcgaatgttccggctcgtctacactgtcatcaatcatgcggcagaaggcataaatgacatataccgcttcccgacgtggacttggcagccctctaaaggcctgataaaaagaggaagaacccttttgcatcaactcttcacacctgctcaaaatcgcttcattcatgttcccatctccttcatgagttgattgacggccatccgtgcactctgcattacaatcggcactccgccacctggatgtacagatgctcctgcggcatataatccctttatattagggaatggtttgggttgcggtcggtatacaccggactggaataatacaggtgctataccaaagcttccgcccccatagagcccgtctcgctctgcgtcagcgggtgtacgtacctttttccacttgatcgctgcacgaagtcccgggaaccctcgttgctccgcttcttccagtacacgttctgccaatgtttcactctcctgatcccagtcgacaccttcggcatctggtacgggaatgaggaaatataatacactctgtccttgaggtgctgcagtttcatccaatgcgaccggattaaatacgtaaaatgaggactttgccggaatgcgtcgctgattgaacacttcctgcaaactgccttcaagactcggtggcaggaagaactggtgcgtcgttgcatcttcccaggttttgtccacgcccacatagagcaatacacatccggaagagggacgatacggttttcttttacgtgctacctctggtgattgtccaagcaaacctgatagatgggggaaatcaccattgtagataactgcatccacattttctgcgcctgctgccgtttctataccttcacacacaccatttttaatcttgagtccggtcacttccgaattcagcacgacacatccaccacgtgatatcagttcctgttccagaatagccggcaatgctgcatatccacctttgaccatccagatgccatattcatgctctgcgtaaggtaaaagggaatagatacctggcgtcccaaacggtgatccaccaatgtataaactttgcagtgagtatgcatcgagcagttcctcatgctcaaaataatcgcctaccgctttccggacacttttgtgtgcacgcaatctgcccatgagggacatgagcgaaggggtgaagaaatcccttttgcgtggaaaagccctttccagaaaagctgcccggcctgccggaaacaacgtgtccatatctttcatgaatcgtgtgaatccccggctctctcccgggaacaaacgttcaatctccgccgtctgttcttcacgtgaggtcatcttggtcatgacacgaccactgtggtaatgcactctgtataacggatcacagcgaagtaactcaatcttcgaacgatctacgcctgcttcctccattatgccaagtaacatctccggcagcagtacgatcgttggcccctgatcgatccgatactcgccttcctgctcatatccaatgcgtccgccaacgcgggaaccccgttcatacacggtgacatcccagccttgacggttcaataacagtgccgaagtaagtccgccaatccctgcgcctacaatagcggcccgcttcatgaatgccctctggcttctgccgtcttcacataagaggatggcttggaacgtgtgcgtgcgtcctcttcctgaatcagtctgacactgatccgtgccgattcgaagatcgtgggcaacccgctgcccggatgtgttccgccgcctaccagccatacacttttcaactcttcaaactggttatggggacgcagatacatcatctgacccaggttatgtgccatattaaacgttgctccgcgatacacatctagttcagtctcccaatcaagtggagtgaacagcatacattcttcaatacggctgcgtatgtctgccagctcaggaatgccttccatgcgtttcatcatggcctcctgcacattctcccgttctgcctcccaatcaatgtctgcggtgaggttaggcgtaggcataagaacatacaaagcagatttcccttccggtgccagcgtcgaatcaagtctggaagggttatgaatatatagagatggatcggctgataacattttgtgctttgtaatctcatcaacgtttaaccggtagtcctcgggaaaatagatcgagtgatgcggcaggtccacatcaccatccacgcccagatacaacattgctgtcgagcaggaatactttttgcgtttcattttctccggggtatatttcttaagcacgcctggttcaaacagatggttcacggcatgtgcaaagtcggcgttcaccaccacatggtctgcttcgatgcgttcaccgttctcaagcaacacaccttctgcacgaccattgcgaacgatgacctgtttcaccggggtggaagtatgtatgcgtcctccgtattcttccacgacatcggccatggcttggaagatccgattcacgccgccaatggggtggaacaatccgtagtgatgctcaataaacgataatatggtaaaggtacccggacaatcccaggcagacatgccaaggtatttggattggaatgtaaatgcccagcgcagacgctcgtctgtaaaatagcgggacaagattccatagactgtattgtggacatcaagcttaggtagagctgttaccgcatccttgcgtagatagtcagtcaacttgccaaaaggacgacggagcagaggcatgactttgccaaacttcacttcttcttcttgcatgaaccgaaggtaattgtcttcattgcccggaaacaattccttaatctgtgcagctgtatcttcccgattacgagaaggcttgaacaccttgttaccaaagttcagtgcgtacagcggagttagctctttcatatccacataatcggataatttgcgtcccaccacatcgaacatctcttcgatcagctgtggcatcatcaaaaatgtagcaccccggtcgaatcgatattcacccagttccaatctggcagaacgccccccgatgactggctgtttctcatacacatctacctcgtacccctgaccggacaataacatcgctgctgcaagtccacctggacctgcgccaatgacagctgcacgtttgcgttgttgattcggtatcatgccactcacctttctatgtagggaattcctatagttctctagcccctaacctattattaaaccgcccaagaacactttaagcggtaactagcaaaaacattatacaaatataatacaaatattatacgaccttgtaaaccaaaaaatgacccgtcggtcaaaatacctggtaatccatttataaacacaaaaaacaccctttgatcactttcgtcaaaggatgtcctttatacactaacctattcatatcatttgagattatgtttaattattggcctgtccaaaccgtgcaccaggtgaccgctcggagagatattcacgctccatccacgactgccagtccgcagaactctccggcataatccattgcggataacgcgcatgctctgcacgctcatagccctttccaccaagtacaaagcgaatatgcgggaactcgtttttaatccgctcgacgagttgatcacatttaacaagaagctctggacttgtgatcgacaggcagaccaacttgatcttctgctcccggataatcgggaagataccttcttctggcgtgttcgcaccgagatacagtacttccgctccatttttgcgcataaaaagagagaacagcagcaatccgacctgatggtgctccccttccggacacaacgccagaactttgggcagatgcggatagatcgggaacagatggaaaaactgataaaagcgctgtgatatcagctgtgtcatgaagtgttcctgagccaccgaagccctgccttgctcccatgcatctccaacccgaaccagaatgggcaccaacacatgatagaacatcgagtcatacccatacatggtgaacccaaaatcaatcaaaccattggcacgttcaccctgaaagttgtagagcgagtcatagatctgatctgccatgcgtgcgtaggcttcttccatcgtaggcaccggagccatgatcggcgtgggcacagcctcaggcggatttaatttgtttactttcaacatccgtaccgcttccgaaatattggtctgatgtagctcaacctgttctttcaaccagcgcagatccgcaacattctcttcggtatacattcgataacccgattccgtccgctcaggggtgaccgcactataccgattctcccaagcccggagcgtcaccgtcgggataccgagcatggcagcgacttgtttgatggaatacaccttattacccactttctttcctaaatgtccagatttcaaaggttatatcattggttccccgtccttgtcaggcatatgaaaaccctaacattctacaaaaataatacactcattatacacaacgctcagacacctgtcgattgcatactgccaattttgccatatgcattttaccactacattctttatgctagcgggttcttctgcgtcaacgttatcatccgtgtggtaatagaagtcagcaagtacagaagggggagtccaccgttggcctcattacgccgccatacatcagaccgcaagtcttcacgcggcaaatttccatacatacgaacaggactcgtcctattggtcctatggctcatcgccgtcatgctctatcagacctacaaaccattaccagcgggcatttcctacgaaagtccggagtatcgtgtggatcaagtcgagttcctgcacgacctcacttatccttcctccgacggacagatggagcacgagcagcagattttccagcgcatgatgcagattgtggaggaagcagagcagtttgtcctggtggatatgttcctgttcaataattatcagcacaagggacaaaactttcctcccgttagtactgaattcaccgaagcgctggtcgccaaaaaaaatcagcacccggacatggacatttggtttattacagatgaagtaaataccaactataactcagcacccaatccgttgctggaacaaatgaaacaagcaggcattcatgtggtcatcacggatgtggaccctttgcgtgattcaactccagtatactctgcggtctggcggaccttcttccaatggtttggccaatccggagatggctggatcaaaaacctgatggccacggacggtccggatgtaacggtccgttcctatctcaagctgctcaacgtgaaagcaaatcatcgcaaagttgttgttagtgagaagacggcgattgtctcttctggcaatattcatgatgcgagtgcctaccactcgaatattgcatttgaagtaacaggtccaatcattggcgatattcttcagtccgagcaagctgttctcgacatctcaggcggaggcaaggttcctgcctacacagctccttcctcgaattcaaacacgggagatttgcgaatacgctatttaactgaaggcaaagtgaatgacgctgtactccatgagatcaatcaagctggcaaaggtgacaccttatggatgggcatgttctatgtggcctctccgaaagtattggaagccctgctggaagcggcaaaacgaggaaccgagatccggcttgtactagatccaaatgaaaatgcttttggtcaggaaaagatcgggattccgaaccgtcctgtcgccgctgaattgcatgataaatccgacggtaaaatacagatccgctggtataacaccaccaaggagcaataccataccaagatgatctatcttgccaaagcaaccggagatcatattgtcctagggggttcaaccaatttcaccccccgaaacatgaatgactacaatctggagaatgatctatgggttgctgcacctccagacaataagttcacactcgatatcgcgaattattttgagcgcatatggaataataatgatgccgagttcacgttagacctggatgagttccaggagaagactacgtttttgaaaggtatcctatataagctgcaactgattctgggtcttacgaccttttgatcagaaaccacatccatacctgttatatccgcctgtactctactgtgcaggcggatattttcatcttgacaggtgatgtaaagtgtggaaatataattacctaacgaccgttaggaaggtgattgaatgactgcacaatccattcgggatgcagccctgttccattttgccagagatggctatgagggagcttctctgagagcaattgctgatgaagtcgggattaaaaaaccgtccatatatgcgcattttagctgcaaggatgacttgtttttacacacactggactttgcatttcacgaggtaacacggcacacactggaatatttccgtgatcatgcggatctgccattggagcagaggctgaaaggcttgttgatctggttcgaacaagaatacaatgcccatgcttcggctcgtttgatgttgcgtaattgtttttacccccccctttctctgtatggcgaagtgatggatcaagtgtatccgtttatcgatggtatggaacgtgcactgactcgtttgctgcaaagggcaatgcgtaatggagatattccggccattcccgcggaacaggctgccattgcattcatgacgtttctggacggtattaccgtggaaattatctatggaagttcccgtcggtacaagagacggttggaagcagcctggcctgtattttggcatggcattcatcatttgaacgacgaggcgcacaacgttgtgccggaaggagatttaacaacatgaaccgcaactggttatatgtatttatcggtggaattattgagattgtctgggtaagcgggctgaaacatgcctcgaatgcctgggagtggactttaacggggattgccatcgtgatcagctttggactgatcattgccgcttccaaaaggctacctgtgggtacggtgtatgccgtctttacgggaattggtacggcgggtaccgtccttacggaaatggtattgtttggtgagccgttccgcttggccaaagtattgctcatcggactgctgctctgcggcgtaattggactgaagctggtaacggatcagcaagaagccaaaggaggtgcagtataatggcttggatggcaattgtaggtgcagggatatgtgaaattttcggcgtaatcggtattaatggtgcttccaccaaaaaaggatggccatacatcgtacttatgctggtgtcgtttgtgttcagcttctcgttgttgtcctacgccatgacgtccattccgatgggcacagcatatgccgtgtggacgggaatcgggacggtcggcagtacgttaacaggcatgttcctgttcggtgaacggaaagaagcgaagcgtatcctgtttatcgcgatgattttggtggcagctgttgggctgaagctcatcacgtaatggaacgaaatgaagttacactttatatctccggtgatagcatacgcttccgaagaagctttcttacagaaagctttaaggcgaacacttcgtttcttcaagtcagttctgcaatctccgttatcgtgtaattcttagcttccattatgatatctattaaattctgtaatataaaaaagacgacttcgatcagaaagtcgtcttttttggggaatgatataaatagggaacctctttatactttccacgtaagaaaggatgtcgtaatcatgagaaaattattggcacgcatgggctcttttaccgggtatacccttctgatcgccatggccattttctatctcatcgctctagtcgccattattatactcgccttgtacgccttcactggaggaaactaacttatccattcttgataccttatccctatcgtacatacaagctgtaccttgttacttgccgtgtattcttccctttgatcagtctcttttctccgctctgattttccaatttactcccatttgaattccttcaactagatcgtttatacttagtttgaccctaaagtcaattcaagaactcataagttccctgatgaggtgaaagtatcgttaatgaaccctatacatgagatgaatgagaagaaaaaactcatcattactacagcactcaagctattctcggccaaaggcagtgccgcaacctccatgcaggagattgcagagatatgcgggatgtccaagggaagcctttaccttatatttaaatcaaaagaggaattggaagacagcacgatggagtactgtttatttacgctcatagacgaactatcccggatcgaacatgaagctgaccttactccgagagaacgttcacacaaacagattgagacactgctcggccatgtgtcagagctaaaggaatttttacgtgtgcaaatgcaaagcatgatgatgaatgatgagccacatcgcaaggaaaaatgccatccgcagcataaagatctggaggtccttacactacacggtttcaaggacaaactggaagatatgtacggaccggagattgaaccctatacgatagatcttattttgctaatacagggtctgttcctctcctacgttaagatctggtttacggaaatgccttcccttaccgtctccaaaatggcagccaatatgctgcaaatgattgattatgcagcttacggattgctcgatcagcgccctgcacctttgattttgttggaagactggcccgcatggaatagtgatccaaacacagactccactgtgatgcgtcatcccattcacatcatcaagcaaatgcaggatatcgctggttccgatttgcccgcagggcaaacaaagaatgatgttctcgaaaccatcgccatcctcagacaggagatgatggaattcacaccgcgacgtgccattattctgggcatgatgcacaatctggagaacgtaactgccattcaatctttgcactccgagcttcagcatattctggatgccatgtatagccggttcatccaggctgactcgtcacacacataaacaggagaaacagagaggagaagaaaccatcgtatgaaaggtattattaatttttcactgaacaacaagtttgcgatttggattctgacgattatcatctctttcgcaggtttgtacagcggattgacgatgaaacaagagacaatcccaaacatcaacgtaccgtttctaaatgtcactgccattgatccgggggctgcaccggagggaattgttgaggatgtcacgaagccgctggaagtaaaactacgtaatgtagatggcgtgaagacagttacctccacttccatggagaacgcagcatcgatcacactcgaatttgattatggaacagatctgaccaacgcaactgcaaccgttcgtgaggcactgaatgaagttcaattgcctgacagcgtgcagaagccgaccatttccaagttcagcattaactctttcccggttgtatctctgagcctgtccgacaaggacggtggtgacctggaacaattgacacgactggttgaatcggatattcagcctgcactcgaagacattgacggtgtagctcaggttcaggtgtccggtcaatatgtgaaagaagttcaattgaagtttgaccaagccaaaatggccgagctgggcctgagcgaagatacggtaaacggcatcgttcaaggttcatccattcgtgtgccccttggactgtttgaactggataaatcccagaaagccgttgttgtagatggtaacatcatcgacatcgatgatctgaaaaaccttgccattccagttgtacccggcggtgccggtgcttccacaggcaatggttcaaacgtagccccacaaggctctggagcaccaactggtgaagctggtcaaggtaccgctccaggtgcttcacaaggaacggaccaagccgctggtggtaatgccggtgtaggtagcccttcaggtgctgccaacgcagctggtatcccgacagtaaaattaagtgaaattgccaagatcgaagtcatcggtcaagcggaatccatttcccggacagacggcaaggaatcgattggtatttccattgtaaaatccaacgatgccaacacggttgatgtcgttaacgcagtcaaagataaagcggaagagttgcaatcgcagttcaaaaatgctgatttgactgtccttcttgaccaaggtaaaccgattcaggactcggtgaacacgatgttgggcaaagccgtttttggtgccttgttcgccatcctgatcatcctgctcttcctgcgtaatattcgttcaaccattatctccattatctcgatcccgctctccttgctcatggcattgactgcgctcaatatgatggatattactttgaacatgatgacgctgggtgcgatgacggttgccatcggacgggttgtcgatgactccatcgttgttatcgagaacatctaccgcagattaacactcaaaggtgagaaactgaagggccgtgaactggttcgtgaagcaacgcgggagatgtttgttcctatcctttcttccacgatcgtaacaattgcggtattcctgccactggcattggtaagcggaatggtcggtgagttattcacaccatttgcactgaccatggtattcgctttgctggcatccctgatcgttgccattaccattgtgccgatgcttgcgcacaccctgttccgtggagggttgaagaacaaacagaatcacgaagaaaaaccaggcaaaatggcggaaggttacaaacgcttgctgaactggaccctgtcacacaaactcatcaccgtcagtattgcagtgatcttgctggtcggcagtttgttcctgtacccgttcatcggtgcaagcttcttgccagaacaacaggataaatacgtgactattacgtacagcccacaaaccggagctttgcgtgaagatgtcgaaaaagaagcacttgttgccgagaagtggttgctggaacaaccgggtctggagaaaatgcaatattccatcggcggcacgaacccactgagcagcatgggtggcggtggatccaactcggctctattctatattgaatataacgaagatacgaaagactttaccaaagtgaaggaacagcttgtagaaggtctgaagaaagaagttaccgtaggtacctggaatgagctcgacatgtccggcggtctgggtggtagcggcctgagtctctccatctatggcgataatgtagagcaactcaaacctgtatcggatgaaattctgaaactggttgaagcggataaggataattttgaaaaagcagacactacactcgctgacacctacgggcagtatacgctcgtggcggatcaggagaaattaagttccctgggcctgactgcaggccaactggcgatgacgctgagcccggcacgggaacgtcctgtgcttacggaagtcgatattgataacaaaacgtacaaagtatatgtagagacagacaacaaatcattcagcagcattaaagagattgaggatgaaaccgtcacttcaccgcttggcatcgaggtaccaatcaaagatgttgccaaagtggaagaaggtacatccccgaactccatcatgcaaattgatggtaaagttgttgtacaagtcacagccaacatcctggcttcggatgtaacgaaagcttcgagtaatctacaggctgagatcgacaagctggatctgcctgatggcgttgaagtgaagttcggcggtacaaccgaacagattaatgatacctttactcaactgggtctcgccatgctggcggccatcgccattgtatacttcgtgctcgttgttacattcggcggcggattggcaccattcgcaatcctgttctccctgccatttacggtcattggtattatggtaggtctgttcatcgctggtggtacgctcgacgtctccgccatgatgggtggactgatgctcatcggtatcgtggtcaccaacgctatcgtgttgatcgaccgtgttattcacaaggaaaaagagggtatgcctacccgtgaagccttgctggaagccggtgcaactcgtctgcgtccaattctgatgaccgctctcgcaactatcggtgccctgttgccactggttacgggcctcgaagaaagtgcggggatcatctcgaaaggattaggaattaccgtaatcggtggtctgatcagctccacgctgctcacgctggttatcgtaccgattgtgtatgagttcctgatgaaatttaaaaagaaaagaatcgaagattaagaagtcgttgattgtactcatgtaacggttcgagtacaacttaaatgtagactataatattagcttctcgccccttagcgcatattggaatggttgaattccgatgtgatgttaaggggctttttttatttaattcacacgagacatagactgacatacaaattcttcattttaatcaaaatcacaaaaagaacagtcccatttgtcatttgaaacaaatgaacgttagatttcagcccattggctgtaaatagaattataatatggattaattatgtaagttgacggattccagactccagatagatcacatgtgattggggaaggatggtggttgtgtgggggagacaacgcttcatattcaagtcagagacatgttaaaacgtcctgtgtttcgcaaggcagaagtcctggccagtgatcgtgcgctggagcggtatgttcgctgggttcatatcatggaggttccagaagtaggggacttgctcaatggcggggaattggtgctgacaacaggcattggctggcaggagggtgagcagcaaggcctgtcttttttgcgtcagttaattgcacgtggggctgccggactctgtatggaactgggggatcacaccaagtcgcagctcagggctatgaaagaaattgcagtagcagcggattttccgttgatctggttccacgaacaagtccgttatattgatattacgcaagacttgcatttcaccctgattcgcagtcatcagcggatgattgccgaactcgacagtctcaccacctcctttaaccaacttcttctgaatggagacggggtacaacccctgcttcgattattgtcacgaacaaccggatatgccgtggcgttatatccacttgaaggggaagcaagtagcgttccctactgctctccagagcagctggagaagcgacggcaggattggtttttgcagcgggaacatttggcgggggaggatattccgaatttaatgcagctgtcagataacacattggatgtgatcagcatgcctgttcaggcgttggactacacctttgccgaccttgtgctgatgcatcaaaagctgacggatcaagattcaagcataccgatcaaaccttcggatgaattcgtcattcaggcactggaacgatgcgcggccgcgattgctcaggactggatgcgaaccaaatacatggaagagaaacgccgctacaaagaagatatgtgggtcattgattggcttaacggacaccactccacgaaggaaatccatgaatatatatctaccgttaatccccttctcgcaacgagcaaagccactattattttattcgacagcaatccagcatacacagatagcctcagacttcagaagttattgatccaacgtaacatcgtcgcccggtcggtatttgctcgggagaacttcaccctctacagcaccgttctgaaccaccagatcattcttatcattctcgacccactacctggatctcagcgcaaaagcagtctctggcgctgcatcgaacagctacaacagcacgagcaggaacagacccactgcctcttctcaggcttgatcggtatcagtcataactgcacagacctctcccgtctcaaggatagtctggaatccgcgaaggagacactgcgaattcagaaggacatcggtgtgatgcagcagcccttttacagtaatcttcattgttaccgcatcatcgctagtatgaagcagagtggcaatctggatgatttcatcgaagaatatttggggccgctcattcgttgcgatgtggagaaaggaggtcagctgctgcggaccctcaagcaatatttggtcctgtgctgctccaagcaagagacagccaccgctctatatatcgtcagacagacactgtatcaccgtttggacaaaatcgaagcccttttgggagaagactatatcctccccgagaaaagggtcgcgatcgaacttgccatctacgcttatgagtacgtacacggcccgatcgcatgaagagcttcattatggtctacgctccccgttgctcctgaagctggcgaatcaggatgtgactgaaccacttccgtccagacgccgtgcctacgtattgctcttgtttctcttcgggaagatccgggtgcccccatatgacgtgagcaccctccagatgttcccgtaccgcatagatccgataaccctgtgcaaccattcgctctatggcgatcctctcggcctcaaacacatcatgatccgacatcagcttctccctccattcactgccgtcacaggatgtttcatcggtatgggcgcgcctgcatcatacttgttgcgcttcacatattggcctgcccctgctgttccggtatactgtcgatctcgaatgacatactccccgcggcacaacaccgtcaccggacatccctgtacctgcataccttcaaatgcactgtaatccacgttcatatgatgtgtatctgccgagatcaccctgtttacagaggggtcaaaaataacgatatccgcgtctgtcccgacagcgagagtccctttctgcggaaatagtccaaataacttgctcgctcttgtcgaacatagatcaacccactgattcagtgtgatccttcctttgactacaccttcggaatacagaatgctgagacgatcttcgatgacaggccccccgttaggaattttgctaaaatcatctttgcccaagtccttctgccctttgaaattaaacgagcaatgatcggagccaatcgtttgcagttgaccacttttcaatgcattccacaacacttcctgatgtgctgcttcccgcagcggaggtgaccaaacatactttgcaccctcaaagtccggctgatccatgatcgattgatccagtgtcaaatactgaggacaggtctccccccagatccggtagcccatttcacgcatacgcgcgatctgctccaccgcttccgcacaggtcacatgcacgacatacagctgcgaatccgcaagtgcagccagacgcgccgcacgccctgtcgcttctccctccagcatggatggacgagtcagcgcatgatgaatcggttcccttcgcccttctgcgagcgcctgtcgaaccagcaggtcaatgacatccccgttctcggcatgaaccatgacgagtgcgccgtactcttttgccttttgcaacgtctggaagagaatcccgtcatccgcctgaaactggtttttatacgccatgaacaccttgaaggatgacacaccctcttcttcaatgatctgcggcagctcttccagcacctgatcgttcatctcgccgatcatgagatggaaaccgtagtcgatggcggctttaccctcagctttggcatgccactcctggagagattcgattaatggacggcctttttgtgtcagacaaaaatcaatgatcgttgttgtaccgccaaaagctgctgctaccgttcccgtcgcaaaatcatccgccgttaccgttccaccgaagggcatatccagatgcgtatgcgggtcgatcccgcccggaatgacgtaacagcccgctgcatctacaacctccattcgttcgtctggcaccagtccgatgccaatctgtgtgattttacccttttcgatcaaaatatctgcttcaaaggtatccgacgccgtgaccaacacaccattacgaatcaatttgcgggtactcatgatatcgcctccttggttgattgatctctaaccgattgcaacatcgcaatcgcagactgacgttcattccaggttacaggttcctgctcaggcacaagctcaaccatctcaatcgccccatccaccgggcaaacgatcgaacacagattacagccaacacagtcctcttccaccacttccagataggagccggacgggtcggtcaacatatcaatacactgatgcgaggtgtcctcacaagcaatatggcatttgttgcaattgatgcaaatatcgcggttgatgcgggcgacgactttgtagttcagatcgagattgccccaatccgagtaacgtggaaccgtctgacctacgagttctgctacgctgctcaaacccttttcatccaaataatcgttcaggccatcaatcatgtcctccacaatgcggaatccatgatgcatcgctgcggtacatacctgaacccctgtagcgcccatgagcaaaaactctgcggtatcccgccaatcagatatgccgcctatgcccgagatcggcacacccacctccggattacgtgcacactccgcaaccatgttcagtgcaattggcttcaccgctgggccacagtagccgccatgtgctcctttgccgcccacatgtggcacggtattccacgaatccagatccacacctgccaaggagttaatcgtattgatcagggagatcgcatctgcgccaccacgtacagctgcccgggcagtcgccgtaatatccgtgatattcggcgtgagtttcacaatcaccggtgtggtcgccacttccttcacccacatcgtctggagttcgaccaggtcaggttgctgaccagaggcggctcccatgccacgttcggccatgccatgcgggcaaccaaagttcagctccaggccatcgacgccgacagcctccacctttttcacaatctcatgccacttctcccgcttaggttcgaccatcagtgatgccacaaccgcacgatccgggaatcgtttcttggtctcggcaatctcccgcagattcacttccagcggacgatccgatatcaactcaatattattaaaccccgccacccgttgcccaccaaaatggaccgccgcgaaacgcgaggatgtattgataattggctcacccagtgtcttccacaccgcgccaccccagcccgcttcgaacgcacgctgaacctgatatcccgtattggtcggtggtgcagaagccagccagaatggattgggtgatcgaatacctgccagattaatggataagtcagccataacgatccctccttggtgttgtttgaacttgcttgttacactggacactccgatgacagaacaaccttccgatcgctgttattcccagatttttttgattccttttctaaagggaaaatccgggaataaaggcgagcacttcgtttcttcaggttctttctgtcctctccgtttcgtgtaaatgtttagttcaatttttatcgttgtactggatatttggtcgtgctcaggatctctgcgtagtaatgggtttctggatagtacctaaattctaacgaaccgtacacctcttattggactcatttgcggcaatttcataatctaacgaatcgtagaaagcttatattactgtagtagctcatttcggcttcatttcaacaggtgttcgtcaacataagacgtgtgagattcgttagattttccaatcctcggtaattgccactataaggtgtgtagggttcgttagcgcgtcagggacattaggaattgatgtacccacacttcttgctcagatcttatctacacctctgtcactctagcagtaccttgcgccctcccacccgtgctctttccttacaccctttcattgcacggttcccgtgtactctccacttttccttgtctcgctcacaactcacgccgtctcttccacctgtccaagcaacgccttcatgactgcggcggcagccagcttaccctgctgtgcagccgagacaaccatcgcctcaccctgaccctgaccaaaaacgacatctcctgccgcatagatctgaggatgtgaggtacggtacgtatgcggctcgatctcgacaacaccccagtggtgacgcagcccaaacgcttcgattaatggtaataaacgatgctgtccaatcgcccggatgaccgtatcacattcaatcatgaactccgatccttccacaggcacgggcaacgcacacccaccaccaggcggggtaattagctccattttcacgcattccaccgcttgaacccgaccgttctcgtctccaatgattcgctgcggcatcgtaaaccagcggaactccacaccctcctgcttggcaaacgtatattcaaacgcatacgccgtcatctggctttccccgcgccgatataacatctgcacccgctcggcaccaagacgtaccgaacaggttgctgcatctatcgccgtattacccgcgccaataacggcgaccttcagaccattcaaagcgggtggaacaccttgcttggtagactccaccagttcaatcgcatcatagacaccttccagtgtctccccttcaatgcccagcataggtactgaacccatgccacaggctagaatgaccgcttcatgttgctccagcaactgcgaagcaggaatatccacaccgatgcgcaccccataacggatctgcacaccaagcgcttctacctgctccacttcccatagcgcaaccgattcgggcaaacggaaagatacgatgccatacgtattcagcccgccgcctttgggtttggcttcatagatcgtcacctcataccctgcacgccccagttcacgtgccgccgacaatcccgcaggtccggctcccacaacagcgacggttctcccattggcaggtgctgcctggaataacggctcattcttcgcccgtgcccaatcggtggcataacgctgcaagtcaccaatgcgaatcggcttcgacgattcgttcagcacacatgcgccttcacacaattcctctgtgggacagacacgtgcgcagctggctccaaccggatttgcatccatgatggtgcgggccgatcctttcaggtgccctgttgatattttgctaataaaagaagggatattaatgtcggttggacaggctttgatacaaggtgcatcgtaacagtacagacagcggtttgattcctccatcgcttccttgcctgtcatggcgggtttcatctcggcaaaacgactctcccacccataatcggataacgttgttcctaagctgttcatcaatgtcatgcacctcctgaagtttgatccacgcagcttccagctacttttacagactaaccagatgttcgtacgtttccggcctgcgatctcggtagaactgccacacattacgcacctcacgaatcatctccgtatccatctcgccaataacgatctcatcctgatcccggctgccgatcgctaccatcctgcctcgcgggtccaccaagtacgactgcccataaaattcacccatattccatggtgcttccacgccaacacggttaatggccgctacataatagccgttagctaccgcgtgagcaggctgttccagtttccacagatattccgatgtacccgcaaccgtagcggacggattgaacactatctctgcccccgccagcccgagcaatcgtgccccttccggaaaatgacgatcataacagatgtacacgccgactctggcgtaggccgtatcaaataccggaaacccgaggttgcctggtttgaaataatacttttcccagaacccatttgtaccctcacctgcttccacatgcgggatatgatgtttgcggtatttgcccagatacgtaccatccgcatctataacggctgccgtattgtaatacgaagcaatgccctccacctcgtatacaggtaaaataatcaccaccgcaagctcctttgccagctcctgaaaacgtctggtcgtgggcccttccggcaccggttcagcggatgcataccatttgggattctgctctgtgcaaaagtacggcccgtagaatacttcctgcaacccgatgatcttggcccctcttgcagcagcttcacgaaccagcgcaatgtgcttctgaaccgcagcctccttatgcacctcaacgggagccgaaccttcaatctcatgagaagcctggattaatccgatgctgattttgcccataacgtcacaacgcctcctcagttaaaatggttggttcattctctccactgcacatcctccgaatagtgcgatacaatacttccgtacccaatccaatatcctccggggaggaaaattcactgggatgatgactgatgccgtctttgctgcggacaaagatcatgccataatcacacacaagcgaaagggccaacgcatcatggaacggaccactcatcagttttggcaaagtaaccccaatctcttccgcggatgaacgaatcaccgacttgattgactctgcacaataccgcggctcactattcgtatcctctgtcagcgagtaggttagaccatatcggaaactcacgtcatccaaaatgttcatcaatcgggcttcaagccggttcctgcgttccatctccatgtctcgtaaatcaaccgtgaagctgacttcctccgggataatgttacgcgagtctggaaacaccctcagacttcccaccgtacctacagttggagcttccgggtcttctctcaccatatcgtcaaaagccgcaatgactttggcgctacctaccagagcatcatgccgcattcccatcggaacggagccggcatgacccgccatgcctttcatcgtcaccgtaagccacaacggacccgagatgcccgtcaccagacctactggtgcattcatcgcttccagcaccggcccctgctcaatgtgcaactccagataactgcctatggaacctggcggatagatcgcttcttcaaaatccgaaggagaacagccgaaggcttccagcgcctcccgacgggtcactccgtttttatcctgccgctccagttcgccttcttccaactgaccggttatgccacgtgagccgaacaggcctttgttaaaacgggaaccttcttcatcgcaaaaggcaattacctcaattggcatatggggctgaatgccattttcgatcaggcattgcaccgcttcgagtgcgccaagcacaccgatcgctccatcatatcgaccgccataaggctgagagtcgatgtgggaaccaatcatgaggattggcagcgcctgatccgcaccctccagacgaccaatcagattgccaaacggatcaagtcgcgtcgtcagaccggcattttccatccagagacgaacttgtatgatgccatccatatcttccggggtcagggcaagtcggcaaacacccgtctccgcgattcggccaatctgtgacaactgctcaattcgctcattcagccgaagctgattaatgagtttgcctgttgtggtctgcatccttcctcgcctccttgcgcttattttcgcgtaatgatatgaaaattttcattttgcttgctaaaccgtaaacgtctgtcgtacctgtgtatggcaactaacctgcgtccagactacgtagcgcaacgagcaaacttccagcgatcagatccaactcatcctcggtggtgacaaaaggtggggagatcgtcaaaatgtttgcaaaccccggtacggtatcgccgttcttgccaatcaggatgccatcccttttacaactggcgagtaccttcattactttatccgcctccgcaggagatccgtctgcttcaatcaattcaatgccacaggcgaatccgaatgaacggatatcccccacaatggacagctccagtagtggctccagcttctcacgaagcaggtatcccagttcttccgcccggctgaccagattctctcgttccagaatctccagatttgccagtgccacccggcaggacaccggatttccgccaaatgtattcacatggcgaaaatgggcatcctgtccgggttcccggaacgtctcatacagatcggctcgcacggccgttgccgatagcggcgaataggcactggtcatgccttttgccatcgtcacgatatctggctgtacaccatagttctgatgaccaaacttctgcccagatcggccaaaaccgcagattacctcatctacaatgagcagcacgccatagcgctgacagatctcttgcacggtacgcatataatccggtgggggtacaatcatgccgccccctgtgatcaccggctccataattactgcggcaaccgtctcaggaccttcccaacgaatcacctcttcatagatggttgcacattcgagtccgcatccatccttttttcgtccaaacggacagcggtaacaatacggtggtggaacatgagagaaacctacgccgagtggctcgtatttgatcttgcgtgcggcttgcccagtggcgcccagcgctcccatggagttaccgtgataggcacggtgacgggagatgaatttgtgccgagtaggctcaccattctgatggtggtactgacgggctattttgaaagccacctcattcgcatctgaacctgagttggagaagaatattcgatactccccctccagccattcattcagcttctccgccagcaaaatcgctggttcatgactctgcgtcatcggtacataagcgagtgctttcatctgttcataggcactccgcgcaatctcctcacgcccatgccccacattcacacaccacagtcccgacatcgcatccaaataacgcgtaccatcctgatcggtgatccaactgccctccccgcttactgcaatcatcggatgatcgttatgaggtgagatgtgatgccatacatatttgcgatctttctccagccattcttccttcgtaccgccaagcggctgcggctgctgatccacagaactcattcgtcatcctcctccacacgcttatttcaccgcttcttcatagatacttttctccagcgcttcatccaggttggcggcttttttgatcaaaccatagttcagtgcaatatccgcagttcgggtaaacgactcatctacaaagctgccgacttgctgctccgtaaacccttccgggcgaatcagctttgcaatctcttccagcatcgtgacctgatgctcgcgggtggtgctgccatccgtcacattactcatcacgatatccaccgtctcatcctgattgtcgatggcgtaattccaacctttcagaatggcacgggttactttgaccgcaagctcacggttgctgtctacccaatctttcttggcaatcagcgtatcctctagcatgccaacaccggcatcttcaatgttgaacacatccagatcagactctttcgttccactttccagtacaacgtgatattcgttatagatcgtcgccgtagctacatccacctgatcattgaaaaattgatccatcgtgaacccctgcttcaccagttcaatatccttcttcgggtcgagtccattcttctccatgaacgcgagcacctgaaactgctgactgccaaaccaggtactgaccttcttgcctttcatctgagccggatcagtaatacctagggacttcttggcaatcaagcgatagctactcttctgcgagatctgggcgagcgagacaagcggcagaccgttatcccggctgaccagcaaactgtctacacccgtaatgcccacatcggccgcaccattgaccacctgctgctctatcacgatatccggaccacccggaataatctcggcatcaatgccttcatctgcaaaaaaacctttttccttcgctgcatagatcccggcaaactgcgcctgcggcacccatttcagttgaattttcactttggttaagggttgatctgcttcgcccgcccctcctgaactcgcagcaacaggttcagtcgccggctcggacttcgtagaacatgcgctcagcatcgtaacaaccaacaggaccaataccagcaaacccggcttcaacgttttgtacatgtacaaacaaccccctgtttatatacgatttatcaagcatcagtccgtgttcaaaaagtctacttttcagtaccgtggactttttgaacaacctctatcaggtattacgatctatgaatctatggttggtaccctgatgtaagttatggatttatgcgtgcgcgattccacggaatgagtcgcttttctgccaggacaaccgcttcatacaacacaatgccgagcgcggcggcgataacaatgcaggaccaggccaagggcatgtttgccagtcgaatctgatccgagagcaagtaccccagcccctgggaggcgatgaaaaattcacctacaatggccccgataatactggtcgacatattgatcttcagaccggcgaagagtgaaggcagcgcatgaggcagtcttagtttccaaaaaaactgcatcctgctcgcggctagaccactcaacagatcactgtactgcggctgaatggaagtcagccctttgaacaggctaacagccatcgctgccatcgtaatcaccgtgacgacagcaatacgcgaccagatcccgtctccaaaccaattgttcataatcggggcaagggccacaattggaactgcgttcagtgccgacaaaaccgtaaccgccgccctgccgcttgttggaaagaacgatgcacctgccgctgccagagcacccaacaatgaaccgagcaaaaagcctcccagcatttcggttccgctgtacatcgcatatcgaaagagcatattggcattttcctgaatggatgccgcaatcgccgaaggcacgggcagttggtagctttccagcgagaatatccaatgaaacaacctaagctgccagagggcgagaaataacacacccgcaccccaaggaagcatgctcagtacagtggagcgcccgcgaacgccagagcctaagccggtctttctggcttgtccccgttgtccatgaatttccgatccgggagcagatgttatctgtaaatcagtgagggacgtagctgcgccagttacagcagcaatcgtcacaccttcatcacgcttccgttgcaaaactctaccttcactcatgtggcatcacctcctttggccctgaattcaggctgccagggtgtcagccaacgttcagccagactgatgaccagatacgagatcagaccaatgccaatgctaagcatgatggttgcccagaacataccaacttgggcatgcccgtaatataacgaactgaccatcaggacgccgagcccatcgggggcccccatcaattccacaacgatggaggaggtcaccgccagcggcgcggctattttcataccagaaaatagtcccggcagtgctgagggcagcaggcatttgatatatcgcgcagtcaatgaagctccacaggaacgcataagttccagatgctctggtgctgcacttttcaatccttttaacgtatggatgatgatcgggaagaaggtgacataagccgccataacaatccgcgcccactccgcattgtggatgatgccgtacacaattggtgcgagaccgataaccggaaccatctgtgaggagacaacatatggcgataacgtgcgctccagccagacagccgcgctcatgagtagagccagacccagaccaagcatcgttcccccagcaaaaccaatggctgcattgccaaaggtgacagccccctgctctgccagcgtacccgagtagcgaaacaaggcagtgaggacatcatgcagataaggaaggcgagacgcggcctgctgaggtgacaggaacagttggagcatccaggcggttgcttcccacagtatcaataccgctgtaatccagataacgacccaggatcgatatcccggtttaaagaaccgcagagacatgagattcatcacgctcctcgtagaagcagtttcgaatggttgtgatcatgtggtagaaggcttccgtttctctcagttcactatgacgttcagaaggcagattgacggaatgaatggaatgtacttgccccggatgtgccgagagcacgatgatccggtcggacagaaatacggcttcggggatgctgtgtgtgacaaagaggaaggtcttgcctgttgagcgcttgatctcaagtagctccaattgaagtttttctttcgtgaattcgtccaaggcagagaagggttcatccatgagcagcaatggtggatcaagtgcaagtgcccgtgcaatggatacacgttgctgcattccgccactgagctgccatggataatggtctgcgaagcgggttaatcctaccatttcaagcagttcaccgctaatgcggcggcactccttccggcgggtaccgagcagctccaagggtaattccacattgtgacgaacggtgcgccaatcgaacaaggcgggtgtctgaaagacaatgccgaactgtcgctgtagtcgagcccgctcaggctcctgacctgcaatgcgtacggtgcctgaggtaggttgaagtagatcacccaccagccggagcaaggtcgacttgccacagccggaagggcccagcagagagacaaactcattggactggatctggaatgtaacatccgacaaggcagtcacttgttgtgtacctgtaccaaaaacaacggacacatgatctacatcaatatggcaggcttcggggactgtggctgaggatatggaggacatgggcattctcctttgtgggaagttgttttcattgcacaccaaggctgaatgggaggtttatatacacaaacgtaacaggttttgcttgttagataatactatatcgctttgggcggggattacattatacagtgtgttttgagtatgggcctgttcatgttacacaatgtaaaatgagacggattctcagatacatacatgtgagttttcttcgtagatagctaacattcatttcacctaacaacaagcgcacaatcatttgtatttattgattaaatattcggaaaatatgacatatgccctcgtattcttgctcattttcttgtataaagattgaatagagaatccagaaatcggggtggtcatgatgtttgattggctgggatggagaaaaggattgccgctgtggcgatcgtatcggttgaacgcacatatgaaggaagatgtggaacagatttttgagggaattgccgaaacgagacggcagcttatgatggactgggcagatgaacaatggaatcacctggatcgtttgcttcaacagatacagtcggtccaattacaagatgtattacaaggttcaaagcaacgaagtaaactagatacatggtttcaatccagttatattcgagccgtagacagtacggagctatttatgctgaacgaacagaatcaggtggtattctctacatataagaaacatattggacagatctatgaagattacgaagctttaattggaccgggattgaaatactccagagcagatcatcatggcaaaaaatgcttgtatggtccatattctgatccactgacgttggatattggtccacgctcatccgcctttcacgatgatgtcaccttgctgtttatctccccaattctgcaggaaggtcgatatgtcggttcattatgcagccgtgttcccggggatgtactgggtgacctgatccaacgagaatcaggccatatctatccggattccggtgacaattacctctttatggctgagtcgatattacggccccatctgcaacccggcaccgccttgtcccgaagccgcttcgaggatcgtacttttacacatggggaaaatctcaaagatggcgtcaccaccgaatggggtatcgtttccgttaaggagcataccgaactggaactcatgttcactgatccgtcgaccggagaactacaccccggagtatcaaacaccattcagaatggttccaatctgtttgtagcttttcccggctactcggattatcgccatatttctgtgatcggcaaaggcatcaccttccagttgccacactgtcctgatcgctggggcatgatgtgtgaaggggatctggaggaagtgtatcggatacgaagcatcggctggcgccagttcaagcagcacagtctcttcacgcttttgtcaggcattgcaggagcagctcttgtctatgccttaactggtagtggttggagcgcagcaacaatggcagcttttaatgtgttatttggattcttcactgcattacagctgcatcgcagccaatatcaacgggttcatgaagacttgcgtcgcatcagccgatttattcgaattaacgccgaaggcaggggtgatctgacccagcgtctggacacgtctgcttttgcccaagatgaatccggtgaactggcgaagtggatcaataacatgattgattctctggaaggcatcatgctgaaggtacaacttgccacggtagacgttatggataatcagtatcagatgcgaacttcaacagagacaacccaaggtacgactgaacgtgtgaacttcaagcttggttcgatgattcaggccattcgcacccaactggaagatctcgatcaggccaagatcgctgctgatcacatgcgcataacactgcaacaactggagacctctgcaaccgaacagatcggcgtggcccagcaggaagtggaacgaatcggcgacaaaatgacccaaatctcaggagcggtatccgataccaaccgtactatcctttccttcatggataccatgaaagagatttaccgtgcactggctgtcattgatgaaatttctgctcagacgaacctgctcgctctgaatgctaccattgaagctgcacgcgtgggcgaacatggccaagggttctcagtcgtggcaggggaaatccgtaagctggccgaattatctcgctcttctactgaaaatattcatcagattctggaccgaatctcaacggcagcaggagcggcatcccaattaatcacagagggtgatcaggtactggctgaaggaacaacactggttcaggccgcttcgcaacttctgcaaaatgctacagctgaagaacctgagcgcactcaagtcgtggatcaagtggtcatgctgatggagaatattgctgcaatcagccatcaaaatcgggcgacttctgccgaggtagaagcagaaatgatggagctgatccgtgatatgttgcaggttcagcattcttcgcataacgtggaagccattacagtctttctgcaacaactcgtgggacaattccatctgaatcaccccgccaaaaatgctgtcatctgacgtcatcgttgacgcggattggagaaatagctaaaatttgatgcaactgttccttttgaaattgtcgtatcatttataatagaagatttccaatctgaaccgatgaaagggtggtctgcatggaactgcttcaggattcatttggccggatacatgactacatccgtatttctgttacggaccgctgtaatttacgctgtgtgtactgcatgcctgcagagggtatggagtttgctccgcatgatgagattatgagctacgaagaaatagcacaggtgctgaaggtacttgccccgatgggcatgcgcaaagtccgactcaccgggggcgaaccgttggtacgcaaggatctgcataagctcgtcagcatgatctcggcaattgacgggattgacgatattgccctgactaccaacgctcttctgctggacaaacaagctcaggcgttgaaagatgctgggttgaaccggattaacatcagtctggattccctgcgcgctgatcgcttctccatgattacccgcggcggagatgtgaacaaggtactgaaaggcattgaagctgcaacagctgctggccttgctccgatcaagctgaatgttgtgctgatgaagggaatcaacgatgatgagatcaaggattttattgcaatgacgattgatcaacctcttcatgtacgttttattgaatatatgccgattggacaggcttcagattcatggcgcaaatcttatttgccgctggaagccgtgactgatgtttgtgctgaagcaggctggacggtagaaaatacaaaaggccctgcgggcaatggcccatcacgaaatatgaaaattgcgggctccgaaggcacatttggattgattcatcccgtaagcgatcacttctgtgacaattgcaaccgacttcggctgaccgctgacggacatatcaaagcttgcctctactggtccgatgagtataatgttcgtcgcttcgtggatgatccaaatgccatggctgcgcttttcctcaaagcactgggtacgaaaccaaagaaccatgagatggctctggctttggaacaaaaaatgcaatctcatacgccgactgtacggcgcatgtcccagattggcggataacaacagtacgcaatataactcaaccgcgtattccttcgtacgggtacatatttgtaccgtccggatgacctcttcacacaacggatgaggtaacgctggcgcggtgaccccttacgtaaatcagcattcataacgtgaagtggagcgtgtcataaggcataggtggatagccacagcagacaagaacatcatgttcttgtctgctttttcgttatattctcataaatttctgaaaatcatcaattctcctgtttcatttgttaaaaatttaattaatatacgttatgcccttatcaggccttcaagattaacctcattctgacgatgtatacaatacatctagatgatacacatacattataggagctgaaccttattgaacattgttgaagcactcgttgcagcgagtccgtattttaaaattatgctcaaagaacacgatatcatgattgcagtaaccgataccgagaagttctggtattatgtcccgaaacgaacttgatctgggcatcaaggctggagaccccgtttccctcgatgaccctacactacgccgggcacttatacatggggaaacttcagcgaaccgtattgatgcaaaattctatggcacatcaatcaactcggcggccaccccacttcgggatgaacaaggaaatatcgtgggcacacttgccattggtttctctcttcagaacgaggaaaaactggagtacttcactgaattgatcggcggtatcagcggaaaattaacagatatggtgcagacggtagccgcccaatccgagcaattgacggcatcttccacgcagattttggataatacccgcatggctgtgcagaactcaggcgaagtgaacaaagtcgccgcattcatccgtgaaatctcagaacagaccaatctgctcggcctgaatgcagccatcgaagcggcccgagcaggtgaagcaggcgccggattcagcgtcgttgcatctgaagtgcgtaaactttctacaggtaccaaagaagctacggtgaatatcgaacgttccttgaaagatgttcagcattccattcagcagatggagcaggagatcacatccatctcacagtctagcaaccaacaggcggtgctggtaaccgagttcagcgaggtcattgatcagttgaacagtgtaagccgtgatctgaaagtgtttattgaatccatgttgctgaaggcggaatagatccgattacgatgaacttaactcaaatgactaaccatatataagagacgcaataccgatgcattatcgagcactacatattcctactcaataactaattcaacaggctatgctaattaccaaattcagcatccacattgaactctccgtgcgattaacgtcacggggagtttttttattttaacaagttgtgccagccacatcacggtccttctaggaatagatgagcttccacagcatcatacacgccagcccaaccatgaccacagcggacaaccgattaaacaccagactgatgcgtccagttcgatccgttctgccaatcaccctgcctgcgcctgcaagtcccaagaaccatatccacgatacagccgcggctgttagagcaaaataaatgcgctccaccccttcatactgaagtgaactggtgccaatcacggcaaccgtgtccagcagagcatggggattgagtaaagatacggatgcggcgaacgcaatctgtcgccctgctgacattaccgtctgcgaaccttccacagattcggacgacctccaaatactccatgccatatatagcagaaacaggcttcctactgcatacaacacattcgccaaaactggccattgcagcaaaatgagcgacacacctgcgacggctgccccgatcaatagcgtatcactgatccctgccgttattacagcaggcagagcatgtatataacgcctctggctcatgccctggttaaaaataaatacattctgcacaccaagtggcaagatcaggccaaacgccagaaccactgcgtgaataacaacctccatcgtgcttcccccttatctctgtattccatagtagggcagatgatgactgacgtaaccaaccacttggatggcatcggacccaaccaaatgatatagtgttgcttacaaagacaaacggaggtgattctgcctgtcatggaacgttctgattctgggctaaacatgggctggaagccaaatccttctcttgaattgcccttatatcgccagattgaagcctatatccggcagaaaatcacaacaggtgaatggtccgcaggataccgtctcccctcacagcgaatatgggctgaatccatgggagtaaaccgcagtacattagtcactgcccttgataatctggcctccgcaggtctgcttgaaggcagacatggcgggggaacttatatttccggctccggttggcatggcatggctcatggagcgatgcccaactggaatgaagccatcgaggagggttggtattatcccaatctgcccgagatccagcagattaatcaggctgaattcaggcccaacatcatacgtctgggtacaggggagcttgccccggagctgatgccacaggatgcttttaacgagattctgtatgccctgtcccaacgttctcgtacactcaactacctggagcctcagggaagcctggagcttcgtgaggctttgtccgtccatttgcagactactggcattcaggcctctccagattccatactgatcgtatccggctctcttcaggcactgcacttgatttcggtcgggcttctccctcgcggatcagcagttctgttggaaaaaccttcgtatctctattccattcacgcctttcagtcggcagggttgaaaatgagcggtatcccgatggatgacgaaggtctatacatttcacgtctggaggatgcagcgcagcatgtaaaagatcacgaccacatctcgcttctctatacgatcccgagctttcacaatcccaccggctctgtcatgagtgatcaccgccgtgaagagctgatgaccaccgctcgaactttgggcatttccatactggaggatgctgcctacagtgatctgtggctggatactcctcctccgtcatcgctgaaggcacgtgatcaggaaggacgggtgctgcatatgggtaccctgtccaaggcagtcagccccggtctgcgtctcggatggctggtcgggccagaaccagttatacgccgactcgcagatatcaagatgcagaccgattatggtaccagctcactcgcgcaagaagccgctgccctgtggttcgcagaaggatatcatgcagaacatatggatcgccttcgacctgagttacgcagacgcagagactttatgctggatctgttgcaacgtcactttcacggcatggcggagtggaacatacccgctggtggattttacatctggctgcaattcactgtatcccctctctccatccgccaattgttccatacctgtctggagcagaatgtacttatccacccgggctatctatatgaccggttagatgcgagtcacattcggctgtcttatgcctatgcttcccctgatgagatggaacgtgggttgcaatgcctcgcagaggccgtccacaggctcatggattctggctcctgacttcgaatgttggttcctgatttcacaaccaaaaaacagccttgacctgaaaggaacatgtccttcagatcaaggctgttagtgtaagttttgtaagattggtcgaataccaaaaacgagcagataccagcttcgctgcgagattccctcgaatgttttacccttttaccgcaccctccgcaatgccctccatgatgaacttctggaagaacgcatagatcagaataaccggaatcgcagtcagtaccagggaggacagaatcaacggccattccttgttatattccccaaacagcatgttcgtggacagaatcagcgtataacgattcacatcagttagcatgagcagtggcaacaagaagtcattccagatccacaggaagtccagaatcgcgatggtgactgtgatcggcagcaagagtgggaagataatctggaagaatgtctggaactcattacatccgtccatctgagctgattcttccaattcacgcggaatggacttcacaaacccgtgatagaggaatattgccatgttcacgccaagtccgatatagatcagggccaatccgtacgtgcttccttgcacccccatgcctttggctacccgtgtcagcggaatcatgatcgagtggaacggcaccagcatggatgcaacaaacaggaagaagatcaggttactcaaacggccggaggtacgtgacaacttgtatcccgcaagtgaggcacagaagacgattcccccgatccccagaaaggatacaattgccgagttcatggaactgcccaacagattgattttgttaaacgcgtccgaataattctcccagtgcaacgttgttggcagcgcgagaaaagattggaacatctcaccctgtgttttgaaagagttcaccaccgccatgtagatcggcagcatagcgacgagagagcccagaatcagcagcagtcgaatcagataactgttcagtcgttgcatcctcatgcttccacctctttcttcttcatgacggtgatctggatgagtgtaaagatgagtacgatgatgaacagcacaaccgatttggcactcgcatagccatatctgaagttgttggagaacgcttcttcatagatattcatcgtgatcacctgcgtggcccggcccggtccaccaccagtcagtccatacaccacttcaaacactttgaatgctccgttcagcgtcaggaagaaacagatggtcaaggcatgagtaatcattggcaacaccacattgcccagtacctggaatgcgttggccccatcaataacagccgcttctttgagacttttcggcacaccctggagagcagccagatagatgatcatcatataccctacaccgttccagagcgatacgatcagaatggagtaaaatgaaaacttcggatcacccagccattgctggtcgaggaacgagaaagccagtttctctgcgagctgtggcagcacctgagagaagatgaatgtccacatgaaagcactgatgattgtactgatcatgttaggcatgaagaacagcgtccggaaaagccctttgctacgcgtccgtgactcaatcaacacggcgagtaacaaggcaattccattttgcagaatcagcataaatattacatatttcatcgtgaaccacagggaattcagaaagtcgggatcttctttgaacaattccacaaagttgcccagaccgataaagctgtaatcctgattgagtccgttccaatccgtcagactatagaacatgccactgaacgtgggatacagcaggaaaatcgcatagatgacaaaggcaggcgcagtgaacgcgagcagtgacagatacttcttgaacacattcgtagccattggttctcccccttttcactcgaagcggatgattgtaaacgagggaacgaagaacgttctgcctgccgtatcatctgcttggagactgcgacgaaacaaagtaccgctaatttgttgacaagctctcaaaccgtagagatttgccaataaaagcggatactccattcctcgcaactccttacttgttgactttgttgtaggatttccacgccttgtcgagcgcatcgataacctgctgttgatttaattgcccagagtagtaaccttgcaacgctttgcctgactcgtctttcaccgcttgagggagggatgggtcctcataagctttaccttcactcacatatttctgggcatcgtctacccacgggaagctcttgaagtcatggatcttggcaatcggattgaacttgagtgcttcgaagaatgcacttgaatccttgtcatcgagaatgtagttcacgaaatcgagtgccacttctttgtttttgctagatgacgatactgccagcgaagtggaggtgctcagattgattttggtatcatccggattgtcattgatcggcattggtgctacaccaaagttcaagtccgggttggacttcagaatggtttcggcaaaccagggtccctgaatccacatcgcggcgcttccagatgcgaaggctgctgaaccatcatctccgcccacttccagcgctttgtccgttccattggcattgacgaggtcgaagatatcgaacaatgctttcatatcggagaaggagccctgatcctgattcatcttctccacgaagtctttgtgctcagactgagttaatgcacccacggtaagtggcaggaataattgcggaatccaggcttctttgtaggacagttcaaacggtgtaatgttggctgctttgagtttctccacgaccgctttcatttccgttaacgtcgttggcacttccagcccttgctcttcaaaaatatctttattgtacagatagccccatgatactgtttccaatggaacagctacgattttaccctctgcatccgttatggaaggtttaaccgaatccagcagcttatcgacaaaaggttggcccgacaggtcttccagataaccagctttgctgaatggtggaatctcattgactgcatgcagggcgaacacatccggtgcatcattggaggcgagacgagtcttcagaatctgaggtgcattgtccgcaggcggcatctccagttgcacgttcacttcaatgtttttctctgctttctccttagctttgaactgttctatatatttgtcgtaatgttctttcagccgaggttgtgcaacgaatactttgagtgatactgtgctgcctgatgcggattcctcctgcccattgtccgttcctgcattggaaccgcaacctgcgagcagaacactgaccagtaccgcacttgctacgcttttccatactttcatctcttatgacctcccggtgtgtaactggtttgtctttcataggatcattatatatcagaaaatgaaagcgcttcattggacaaaattagacttgtgtattggattattttaaaccttaatcctgccgcaaatgctctctcgaatgtctcattccgtactactgcctgatttacctgatatacgagcctgtcccttccgcatctcccctggagatattccgaaatgcttcttaaacactcgatagaagtaggacacatcctcataacccgccatctcggcaatatgcttgaacggaatctgttcatccatcacccattctttcgctctcgtcatacgtaattggacaacatagtcggtcacattcacctcatactctttcttgaataccttgctgagatattccttactaacaaaaaagatctgggcgagctgctccagcgtaatcatctccatacagtgttgctcaatgtattgcttcacctcgtccaggttcagcttgttcttaaatttgcgctgcgtaatcagctgctccaaagcctggtagtatggagtcgaaatccatgcgatcgtggattcaatggaagccagtgcagccgcaggaggtagcgccgttgcttcgggccgctcatacaagccattggagacgcacaactcatccagcaaagcctgtaattcatgagccacccgcccaagctgccgaggtctgttaatctcgcatcgttccagcttctgctgtaattgctggaaccactcacgcagactctgaccgttcaggtcattaaaccgcaggcgggcctgctgctgaaacagggagaactcacctgcgaacgaagatgggtacgattcccacgattcaggtgctgattcaaccttttccaactcccttgcacatttagcaagtacaccattcagttcatccggattcaccggtttgagcagataatctgcagcccgatggcggagcgcatgttttgcataattgaagtcatcatatccgctcaccacgatcaccttgatctgtgggtattgtccgctaagcgtctgcaacagctccacaccgtctgtgccgggcatgcgcatgtccgtaatgataatgtgaggctgatgctgcttgaccagttgtatggcctgctcaccatcctctgcctcacctgcaacggtcatgccgagttcattccaatctcccaggttgcgcaaaatatcccggttccacggttcatcatccaccaacagcactctgtacagttccttgttcacaaggcttcgcctcctgtattgcaggggattcgtaccgtaacgcttgtcccctgtccgtattcactttctatgctcatcccatattcaggtccaaaatgcattaccattcgtgaggccgcattgaccagtccaatacttgtacctgaactccacacccgatcagcctgccgggtaagccgctccagtctggactgcatctccgttagtctctcagcatccatacccacgccgttatcacaaattcgaatggttacatctctaggttcacagaccacctcaatgcctagcttccattcgccctgtttcttctccagaccatgcaaaaatgcattctccacaatgggttgcaaagacaacttggggatataacacgcccgaagttctccggtgatctccagtgtatattcaagcctgccggcaaaacgctgcttctgaatcagcatataatgctccaactgatcgagttcagactgcaggggcaccagtccatccggcgctcgcacaatataacgaaacatctcgcttaaggctcgaatgaccttgtaactgtctgccggtttttgcgagtagaccatgccgccaatcatctgcaacgtattttgtaggaaatgcggatggatctgggattgcagtgctttgagctcggccgtctgcttctccagattcattagatagttgtcgcgaatatgttcccggatacgactagccatgccgtgcagatttttctccagcagaccaatctcatctacccggccacttcgcaccacttccctgtccttgatcagttgaatacccttcatggaatttgccagtctgacaatgggctttgatgtacgccaggctacgagcgcagctagtcctacagaaatgacggttgccaggccacccacaaccaatccatatttcatcgtttccaaggcactttcgttaacaacatgggcaggtacaatcttgatcacacgcagtcctgacggctcaatggaatgaaagaatacgtactccttggctgtacggataaaccccgaactttcttttgtgcctgccaatttccccagtgcttcctctgaaggctgaatatcttggtttggctgatagaccggactccccgtgctgtcagcaatgtataccgcatagtcaccccggctatccagcagctccagggtctggttgaactcagcccacttgacctccagactgatggccccgatctgtgcctgatcctcgaagcggttcatgctgcgggtcatgtgaaacttttgcggatcgtccggatcattgataatcgtaaaatctttatgttgtgcaaaaagctcatgatatccttccggtatttccgataccgctttgatgcgagaatccatcgagttgaaggtgaacaaggtgtccaattccttcaggtacagttcaacgccaaatacataattgccagcagaatagtatacactgttcagcatattgaacatggccttctgttcatcgaatcggctggccgccggcgcttcctcgttcaacgccagatattgatgcaattcgtcactgatctgaatcgaatagataatgttgttcatgcgcgcgaactgttcacccagatagatggaggcccagttcatattggctcggttggtctccataatctcctcttccatggaagagcgggtattctcagcagccatagcggtcatggcaatgacgggcagaacggccagcagcgtcatggtaagaatcaatttattgcgaatgctacgtttgaaaggatctatcagcttccgataacattcggtaaacacagcgcatccactcctgagctaaaatagacaaacgccccagcatggaagctgagggcgctttggtctttatattcgtttggaaatgttaaaatatcacgttatacaatagaatgaatggttacacgagatcactacgtggtcagaacaaccctctgatcgctgttatcaccggatttttttgattcccttttctaaggggaaaatccgttgataaaggcgaggtatatgcttccgatgcagctttctttcagaaagcttttagctccgcttcctcaggtttcttctgccctctccgttaacgtgtacatgttgaattcaacttatatacctatatttattatttactattattgttcgataatccgtatgccccaaggctccaactcgatcttctctcccgcagcaatcggggttcctgccaaaagttccgtcccttccccataagcattcacgaaggatgttgcctcacctgcataattgaaatagtagcgaatcgtgttcccttgatcgttcacacctgtcttcacaatgataggaaaagccagctcctgatcagctccccatacgcccgcttccttcatgacacgttccaacaccttacggatcaccgcagaactggtgtaacatccgacataggttgttttgccttttccataggcattctgggtaattgccgcatactcaccccaatgtggatgatcataccaagcgagtacttcagccgttgttggtgtaatcagttccatccaggtgtgaatctgattctgctcctgaccaacctcgaatggatcatcgcgcagcgaaacatgtttgggctctacaaaaaggttatagctgattccgcatgcctcactaatcaggccgggctggcgggtagagcgtaccttgatatgctcatttgtgaatccgcttttgaacgaatagacgatatgtccaccatcctgtacgaattgatttaatttttccaacaatgcatccgaagcagcatacagagcaggtacaacgagcacgtcatactccgcataactctcaactgatgggtcgatgaggtcacagccaatgttcatcttgtacaattcatcgtacatccagcgcaccacgtcattgtagttcttgtcactggtgaagttaaaaccaaaccacttgatggatgtcagtgcctcattgctaaacagcacagccacccgattctttttcttcagattcacaagcttaggactcagtcttgcaaaatccctgccaatggtcttcgcttcgttgtacaccggattcggttcaaagtcatgactgagcaatcctttccagtacgtctccaacgaattgtgcaacgaatgccagtgccagtaggcgaccatgttcgctcctgatgccagatgactgaatgcctgcaagcgcagctgccccggatagggaacccaatgccagaacgcctgcgcttcggtctccagcaccagatagttcgattgtttggttgaacgtgccacatccccgccaaatgaaatttcaatgcctgtcagatcatcctgggaaggatggtagatgtccacactggtgatgtcaaaaggtttcgatgcggcaaaatggtccacatccccttgaatgccgtaggaatatccacgccaatcgaagtcaaaattctgggtaacaaactgtccttcctgtttgtattcattcacgatccccacttgccaagccaaaaagttggttaccagctgccgctggaacttggcaaattcagcgccaagactaccgttgatcgttcctacaacagacgggaagtcttcccagctattgattcgattgctccagtagtcgaggccaaattccttgttgagttcatccagagaactgaacttgttccgcatgtatttgacgaattgcagttgtacattatctccggccgtattgtaatgcttcgtctcgttatctgtctgataaccgatgaccgctggatgtgtgcttacccgagagatcagcttgcggatgatccgctcagcatagaatagataggttggatgtgtaatatccatgatttgtcttgcgccgtatttgccaggtccctgtgaggttgtagccagcacgtccggatgttccttgaccatccatgtaggaatagcataagttggtgtgccaacgatgacctgaatccccgcctcatgcatggcattgagcacacgatccacggaagagaagtcaaatacaccattctgcggttcatgggtactccaggttgattctgcaatacggaccacgttaatccctgcatccttcatcatctgaatgtctttgtccaatctttcgtaaggcatatattcatcatagtaagctacgccatataataatttgtccatgatttaatctcctttttaggtggaaaatataatgatcttgacgtgtgcaagagttgacatattccaatccataatggtagcgtttacattaatgtcggttgaagaacttggattgttcagcaaccacttcaaacgctgatgtattccatggattatccatgcttgcgttaaactgattataatgaagtatactacgggtgccgattgtataaggcaagttgtttttacccttttccgaggtgaatatgatggatatccgatcacagctccgagaaatgccacaccatacgctggcccactggctgcctattatcgactgtaacatcaaattctatggtgctcacagccaacaagtaccctttggatgggcgatgccggaggaatcacatccgggctttgagattatgttgatcatcgaaggtacgcaggagagtgtgattcatggttatacctataccgtggaggaaggttccattcttctcattcctcccgggttcaaacatacgaatcaatgtgtatccacggaaggcatgacttattttagcgctcactttaatgtggatgatccggtcttcaccctgaagctgatgtcacagcacagccgaatctacgcagcaggtacggcagataataggaagatgcgcgttgtgctggagagttggatggggatgattaacgtatctgaagcctacacgtccactgacaaaatgatcatgcaggcacgcatgtttgaactgttcgccctgttgtcccaagccgctgacaatgaaccggaggccaccacttccgttgctgcttcacatgcaccagctccaacagccatgcattatgcgggagctatagcggaggcaatcaagcaggcattccatgcccagcttcgaaccaaggaaagcagtgtatccacggtcaaagtagagcagattatatcctcgtttggcatcagcccgggatatggtctacaggtctttcgcaaggtgtatggacgatcgcccagggcttacctgtccagcttgaagttgcaggaggccaaagtgctgatcgaacagccagagctgtcgctcggggaaattgcgtggaagctcggctacacccatctgtcccatttcagcagacaattcaaacgttggacaggccaaagtccgcttcaatatcgcaatcatcatgcagatgcatcaggtgatcctgtatcctacagatcggaatcgagtccagaaccttgattacggatgcgctcgtactcttccggcgtgttcatattactcatttgcatcgctacttgatgaacgccagctctctcaagctcttccgcttcgacataacagcaaccgatctcttcaagccatcgcatgactcgaagatgatcttgtatcagacgctgctccagatcagggagcactcgtttgtggtaagcccctgcaagagggtggacatgtccatccacgcgtggaacgatagcagaataagagttatgcgattcgaccagtttttttattccatcaaagaaagtcgtttgcaggagcggcatatcgcaggcgcagactagattccattccgtaccggaagcctccagtgccgcgtgaagaccggcgagtggccccttccccggatagtgatcctgaacgcattcgtagcccattgtaccgtaggttgtcacattgggtccggcagccacgatgatacgggatacggcgggtctcatggcctttgtgacatgttgcagtacaacggaaccgttcagttccaacacggctttgttggtccccatgcggctggataaccctcctgccaatatgatgcctgtccattcacgcgtgttcatgttgttatcctccctcagatcacgatatgtgtttgactgcatcaatttcaaaacgttcgctatgcattgaatcccctttcaacaaatgatacattgaacaatatgcatttgaaaggaatggcttaattggacagacctgcaccttcaagaggcaatccctcattggtttctctgaaactatataactttttcatatatggagccatctccatcttcgccggattcctgcagctttacctgcaagagattggtatgaccaaactggagattggtagtctgatggcgattggaccctttgtatccttgtttgccaacccgttctggggtttctggagcgataaatctcgcaacattcgcatcattctgatgattatgatgggaggcacatttgtgctcgcccagggtgtattctatgcgcccacgtatacgtggatctatgtagccatgattttcttttatttttttcaaagcccattatttgctcaaacgaacagtctgattctcggatatatcgatggtacaaaccagaaatttggatcattccggctctggggttcactcggttgggcgctgactgccgtcgcagccggaccgctcattgaccgttttggcatcggcagtgtatccattatatttgcgtgcatgattgccaccgcctttgtattatccgtatttctacccagacagccgatcgcttcggatacaccggtggttacttttcggcggtttggcaaagtcatgttcaatccgtattttatggcatttatcggcctgggtgtactcgtatcggtgcctaatgccatgaacagtacgtttatgtcactatacatagtagaaatgggtggcgacaaacagatggtcggctgggccatcttcacctcatccattctcgaagtcggcgtattcctgctgctcgaccgcttgctcaaacgcaaaatgagcatgctcctggcatctctcattctgatcagtgtgctgtttgcacttcgctggcagctcatggcactggctaacaacccactggagattgtattcattcagttgatgcactccattacgtttggtggatacttctatgtaggcacacagctgaccatgctgtttatcccaagaccttatcgttcctccggacaagcggtgtatacgatggcctggggcggtctctccggcgtcattgccggtctgttcggcggctggttgttccaaagcttcggtgcagaaatcatgtatagcattggcgtattcttctcgctcatcggcgctgttggatttagcatcatgtggttatcgaatcgacgtaacggctatcaaccagttgtgttgacagagatgggtaatatggatgaggaccgataatcttttgttagaaaaagttgaaaaagatttccactggagcactacgaggacagaagaatctttcgatcgctgttatccccggatttttttgattcccttttcaaagggtaaaatccggggataaaggcgaccgctccccttctccagctttcttctgtcctctccgttatggtgtaaataaaacgttcaaacattcagacaaaagattaatcataggtgcagtaaagagaaaaggcgtctaaggtttgttgctcctaacgaaccttagacgtcttatttgcagcaatttcacgaaattctaaagctaaagaatctcagccaccttatttggcataaaagacgctgaaaacccaaaaaagacaagccaaatgaggaaacaaggtgtctacgattcattacgttgctggaatgtccaaatacacttaaataacgtgtcttcggttcgttagattcttgcctcatacgcacatctatggccttagctcatgttcatgttcatgttcatgttcatgccgaattgtatgctcattctaaaactggatctggctagatccagaaaaacaaaagggcatccttcgccatgatcatgacgaaggatgccctccctttaacttataacttggctgcttaccagcactctgataaacagaccttaagttcatccagcggccttatgccttcggcagttggaatgagctcttcagggatacgacccggttaaataccggacgtcctggctcggagtgtttcggatctacactgaagtaaccatgacggaagaattggaatttatcctgagcgttcgcttccttcatctcttgttccacatacccattaacaatctcaagagagttcggattcagttgatccaggaacgttttctccggttgctcttccacaacctcagcttcagccccagctactgccacttccacctctgcttccggtgcttcatccaggatcaacggctcgtacagacggaattcagcaggtaccgcttgagtcgcttctacccagtggattgttcctttgactttacggccagtgaatccactgccgctcttcgtctccacatcataggtacaatgaatctcagttacattaccttctgcatccttaatcacatcattacatttgatgaagtatgcatgtttcagacgaacttcgttgccagggaacaaacggaaatatttatttggcggattttccatgaaatcgtcttgttcaatataaatttcacgggagaacggaatttggcgattacccatctccgggttctccacattgttctctgcttcaagccattccacttgtccttcaggatagttggtgatgaccactttgagcgggtgcaggacagccatcgtgcgtggagctttcagtttcaagtcttcacgtacaaagtgctccagcgtttgcaggtcgataactccatagtttttggaaatgcctgtctcatatacaaaatcacgaatagcttccggtgtataaccccggcggcgcagacccgaaatcgttggcatgcgcggatcatcccatccatccacatgaccttcgtccacaagcagtttcagcttccgcttacttgtcaccatctgggacaggttcagacgaccaaattcatattgatgcggttggttctccatctcacactcggcaataacccaatcgtagaatggacgttgatcctcaaactccagggaacagagagagtgcgtcacaccttcaatcgcatcttcaagcgggtgagcaaaggcgtacattggatagatacaccatttgtcgcccgtgttatgatgatgtgcatgagaaatccggtaaataaccggatcgcgcagattgatattcggtgcagacatatcgatcttggcacgcagcactttctctccgttcttgaattcacctgcacgcatacgtgtgaacaggtcgagattctcttccaccgaacgatcacggtacgggctgttcttacccggctccgtcagcgttccgcgcatttcacggatttcgtcggcgctttggtcgtcgatgtaggctttaccttttttaatcaacaagacagcacggttgtacatctcgtcaaaataatccgaggcaaaacgtttctcattccactcgtatccgagccatttcacgtcttcctgaatcgattgaacgtactctacatcttccttgaccgggtttgtgtcatcaaagcgcagattcgttttgccgccaaattcgccgcccagtgtaaagttaatccagatcgccttggcatggccgatatgcagataaccgttcggttccggaggaaaacgggtaataacttcctggactttcccagaccggagatcttcggtaataatatttttgataaagttaggtggggttgtacgattgtccacaggtatcaaacctttcatgaatggattggagccttcgggaattgctgcaattccggctataattccttaataacgaagtcatttcctgaaaaaatctattttcttggaaagtttcgtacgcgtttcatttaaatatacctttaacgggggaggagttcaataaagaaggcatcaaagtcaggattagccgtgcataaataggccctaaaccattttgacgggttcgctcgaatcatgtagcatgatagtaaaaacaaattaaagggagggtttcccattccatcgaactcgcttaaactgaccaaagaacagcaggatgaagccattcgcaccatccagtcgtatttcgaagaggaacgtggcgaagaactcggcgatctggccgcttggggtgtcctcgacctgttcatgacacagctcgctccctacatatataatcaggcactccgtgacgcacgaacaacggtcaatcaacgcatggcctcaatggaagaagacctgtttgcactggagcaaaagttacccaagacctcacgttaatccactacaaatacgtgttctaaaaatctggttttcatattcgatgctgataatgccgttaggcatgatttgtaatcaaaagtggacttttttgaacaacactataaaaagaaagaaggttgcattcatgtttacctattcattggatgaatataccgaactccggccactggctatggaacataccaaacctctgtttgaactgacggatcgctcgcgggatcaactgagacattggttgccgtgggtggatcatgtgacagaagtggaacacacctcgaactttattaccaacgcgttaaaacaaggtgccgagaatggcggattcaccgccggagtatggtcaaaaggggatctagctggcgtcattggattccacgaaattaactggaccaaccgctcggtaagcataggatattggcttggaaaaggctttgagggtcaaggcttgatgacaagcgcttgtcgcgttctggttgattatgctctggtgaccctggacctgaatcgcgtcgagattcgctcggcaacgaataacaaacggagtcgcgctatccctgaaagactcggatttgttctcgagggtgtcattcgtcaggcagagaaactgcctaaaggttacgtgaaccatgcggtgtacggcatgcttcagcatgaatgggaactcttgcgctaattcgcctacataatgaatcgggagtgatctctcccaacataatggatcaacacgaataccctcgatctccacgtaatgtggtgacagagggtattttattgtatccatgacttttatagtgctcggaccataccaccatccacgatcaatgaggttccggtaatgtacgtattggctccggataacaggaatacaaccgctttggcaaactcctctggttgaccataacggcccagtggaatctctttacggaattggtcagatacctcttcctcactgattccattctgctcagcccgtgctgcatccagctcacgtatacggtctgttgcaatacgtcctggcgccaccgtgttgatcaaaattccgtatggagccagctcctgggataacgtcttcgccaatccaaacacgccagtacggaacgtgttggacagcaccagacccggaatcggctgtttcaccgaagttgaagcgatattgacaatgtgtcctccgctttctttcatataaggaagagcaccgcgaatcagccttacataactgagtacatttaattcaaatgcacgttcccaatcttcatccgtcagtgactcaaatgaacccgatggcgggccacccgaattgttcaccagaatatcaatctgtccgaacatttctgctgtcttgtgaatcagagcctcaatatcttccttgcgtgtcacatcggttgcacaatattccacacgtccgccaccaccaagcgccagaagctcctgctttactgctgcgagcttttcttcgctccggctggcaagcatgacgtcagcaccttctgctgccaattgagcggctaccgctttgcccagtcctcgactggaagccagcaccagtgcttttttaccttgaagtcccatgtccatcgttgttcctcctcctcagctagtttctatttggtctggataaaataacccataagaatatcatccacatacttgcctccgatataaaactcggacaccaatctgccttccgtcacaaatccacactgtgtataaaacgtaatcgctcccggattgctggaaagtacgcgcagcctgagcttgcgaacgccttgttgggccgcatgctgcttgatggcattcatcaaagctgtagctatgccacaacgccgatcatgaggatgaaccgcaatatgaatctcgtagacatgacggttgaccggcatacctgtggctggctgaaagcccacataaccacatacccgctctccctgcaccgcaatcaattgactgcctggcgggcaatgctgcagatattgttgtctggaacgccattgcatcggtgcaggagaggtgtatttgtcccataccaaggcatccaactccattagctgggctgcatctttaatctcggatggacgaatcgtaaatgtatggctggtaagcataatgattcaacctttcgtgctatagtcgacaacgctgtgcgctacaacgtcgggaaagttaagagagttaagaacgttgagaaacttaggaataggaagacattgttcgtttacttcactatttaagttttttgttctatatattgtagcatagcctcagctttgactaaaattccactcggtattgaaccttttcgcaaaataaaataaacacttaaccttgccgttacgtcatagtttatactgattcgataaggaggggatgcatgatgaatatcaaagaggcagcaagcaggcttggtatatcggcgagagccattcgtttttatgaggaaaaaggattaattctccctgccaaacagtccagtaacggttatcgcacatacaccgagaatgatatctggcggcttcagaccattgctgcactgcgtgagattggcatgtcgctacaggatattacacatgcgctaggagagattgatcaagggaatcagcagcggctggaagaatatctggaactgcaacaggccgtcatgtatgcccagtggattgagctcaaacgtatgatggatacaacccagcgcatgattgacctgaatcgtcaggacggaccgctggatgtcagccatctgcacgatctcgcagacagtgcccgtcgcctgcgtgaagcacggcagaactggcatgatcggtggaattatgacatgcaggcagccatccatgatcagcgagtgcaggcagaaggcagagtcagtactgaacaccccaattcagaggacaggcatcattcggccaacccctcgcctataagcgatgagaatgaagtttcacatccaaaccataatgcaggtcattccacgccgggcgattccaatgatacggtacagtcttccttttatctgtatcacaactatgacgaagcgctcgaacagacagctcattggatctctcccgcccttggtgagaaaggacttgatattggtacaggcacaggtaatctggctgggaaactgctacagcacggcgcagacatgactgcaatcgaccaatcccgggagatgctacgcagatgtcgtaccaaatatcctgagatgcatgtgaaacttggtaattttctggcgttgccttttgttgatcattccttcgattttgttgtatccagctttgccttccatcatctgagttcagatcaacaactattggccttacaggagatgcagcgggtattaacctcgcgtggacgtatcggtctaaccgatctgatgtttgttgatgcgactcaccgtgattcctatattcggcaggcagaaaccacaggacacgaggaacagctgcgcgccttacgcgagcgtcacttccctctgctggatgagctatgcggctggctggagcaacagggctacgtgaccaagcatgtgcggcataacgagctgttacatacgttgttggcggttccactgcgctagtggattatgagcatatgccaaaaaggccatcccgccttgattaaaggaggatgaccttggtgtacatcatgctatgaaattacatatagatatcaacaaccgtacgctcagtttcactgcgtgcttgtctgaactcatccagtgagatgctgaccccgccctgacggtaacggttcgctgtacgctcagtacgaatgtctttgccattcaccgctacacggctcacagcaccttcgttcaagtgataaatgaacgtcactggctcacctgcatactcgaattcgaattgcatgccgttcagctcagctggcaataccgggtcaatgaccagatcgccgccctcttgacgaatgccaagcgcattggagatcagctggttcatgtagattccagggccgctggagtagattctccatccgcctttcacttgtacagtccctttacgaagctggtcaaaatgctcctgtgcctcataacgcgtattaaacttgccgtccgaactactgaagtatgagttcgcttggcgaatctccgcgttaggtacaacctcgccaataccaaccgggttgatcatcgcaagaccattccacacctgatctgtcttcccgagcttcgccatcgcttccacgtaacggatatgggcgtgcacatattgcaaaccaatctcacgtccgaagttagaggcttgctctgcacgtttgaagtgtgtgcttacaccaccagcatattgagctggacgattcatcagacgcacgccatccgggcataggaactgctcacggatcaaggcataatgtgattctgcttgctccgcattcagcaattcaccgatcatgctgcgcgtcattggcagcagacgatattgaatgcctgtctctgtgtctgttggatgaagcatcagcttcgcttggtcggcttcttccatgtatacaaaacctggaatcacatctgtgcccagcatgtaacggttaaagtcctcacggatgccttgagccagcacgtcaagctcctgtgcaaaatccgcatccttgaatttcagcgcttgcgagagcacgttcacggattgatacgtcaatgccaccgtccaactgctcaccatgtattgcttcagctgtgcattggctggttggagcgtatcatcccagtcgccatctccgtaggaagacaggaacgtatcgtgcaggaagtgcgaacggatatattcgatctcttttttcgcgtgatccagtaccgttgccgtctcttccgtgaacccgaagctatgtttgacggtataaggtactttctcatccaggattgcatagtcgcgagtcgctgtcaggtagtccgccaatactttcaacggccatacgatgatatcgccatggctctcttcctgttgaatcgcaaagtatttatcaaacatgaaccattgcggccagttgccatcatcttcatattggtgggtataaaccattttgatgatatcgcgaacttgctcatatttttgcgttgccataaagtactccaccggaccttggcacacatctcgtgtaccccaagccgcgccaccgtactgctccaaaccgtgaggcacagaatagtgaaccagcatattgtgggtgtaccaccaagccagcgcatttactttgaacagatcctctgcactctgaccttctccacgggacaaacggaacccgttcatcacacctgcgaagaactcgcggtatgcctgcacttcctcttcaaacgtcaggcttgaacctgctaccactccgctgtccgcttgaccttccaataccccttgtaccttcagcgtccattcagcactcgcttccagactaagcgtaaccagtgatgcggaaccactgcggataccacttgccagcaacgtttcgtcccctacattcacagctgcgccgtccaccgacatgcggtattgcagatctgggtacgtccctgcactaatcgcttgtggatcagccttgaagatcaaagtatcgccatcttgcgtcatatgcaacggatactcgtattcattcacattcatcgtaatctggtttgttaccaggtaacggtatgccgtgccacttgtggagcgtacgttcatgctcacctcggtggtgtgtgcccctgtatagttcgttacgatgatcgtatcggatgccgttttgtagatccaacgtacatagttgaagccaatctcgaacagggaaggcatcgtcagcagacgatattgtccgtccatttccacatagatgcgttgtcccgccgttttcggcacgtttaatgcattgcgagcattactgatcattttattaaaattggtgttaccaataacgagttgtgagttgaaaataccgtacatatacgatgttgtcgtaataacctgtgctccaagttgcacgttgccaccactcatcagaatgtgaccgtgtggacgctctacgagcaattcttttgctttcagaacgatatgctcatagctgcctgtgaagaaggacaacagttcctcaccactgtgctcttcctgatgacgatcagggaacagatcatgaatctcatcttgcgtcagatcaagtgtaaccagtggttcacccaggaaggaggacagtttcacctgttccaacgtgtcaccattttccacagtcagagcctgtacttcattccatgctgctgtaacttcgtctccaaattccagtgcagatattccttcggcatgattaggcttcgccagtccataaaagaccacctgagcttctccgttcagattcaacagttcagattgcaatgccgtataggcaaattcatactgatatgtctcatttgccagcgttgggcgattcaagctctctggttgattcgtttccttgtacgacagaccgaagaattggaatccatctgtggagtaaccgacagctttcgtcagggaaccttgttgcatataaggaaatgcgccgccctgaggctggttttgacgggaacaaacgacataacctttcgcttcatcttcaaacaccgtgtggtcaatgtattgtgacagataagcttcattactgcgtaccgcacctggatcagcaagccctacatcctgtccgtacaccacgtctacgttatcttgttgtcctgtgagcttcacatcccagaaccatacaccttgaggtgtagctgtaaatacgacctggtagccaatgcctttttcgctaccttccagctggactgtgccctcccagatcaactgattgctggattgtgttttgcttgtaatcaccttgctgttcgaacgtacaccgagcaacgggaacgagttgatattctctccctcatgtacacgcaggtacaggttgttcaaagatccatcaatctggttgctgagcaactggttcaacatcgttgtaccggatgtagcctggtataggtcgccactgttcaaaaaggtaaaggataactctccggcatttaagcggatcggttcattaatcatcgttgtcataaggttcactccttgaattagttaaaatcgaaacgtttcgataaatctgaaaaagaataggggcctcttcaaaccggctttttacagcccgtccggacgataaccccatcattaaacttttacttcagcatgcaggcagttctttgctgttcagactcggtctaaaccgaacgtacagagctgcgctcgatcatattaatcgttaacgtatatgaagggtcaaccgcttcgccattgagcatctggaataaaagatgtccggcgagcgacccggcttcatgcttcggctggcgtatcgttgtcagtggtggatgcacatattcggacaactgaatatcgtcaaaaccaatcacggaaatatcatccggcaccgatacaccacgctcttccaatgccttcaggccaccaatcgccatctcatcgttaccgtaaaataccgctgagggaagatcgccctgcatgatcatcattttggttgcactgtatccgccctcacgcacaaagttaccgttcagacgccatttggacttttcttcaagtcccgcttcccgcatcgctcgcagatacccttggtaacggagcgcgttgtcatacgagttggatgggccactgatataagcaatcttctgatgtccagcctggatcaggtggcgggttgcaaggtaaccgccttgctctccatccaccagcacgttgaccagatggtcactcgacagctgacgatccatcacaatgatcggaaaacgatgaccggcagattctaccagaatatcatcatgaatgttatgcgccagaatgatggctccatctactcttttttcacgcaaaaatcgcactgccgttgaatcccgtccacccatggagctgcaagcaatcaggtcatacccgttcgcgagggctacatcctgtacactacggatcaattccgagtaatacgggcccgacagatcggtcaggatcaaagcgatcgtgtttgtccggctccgtttcaggtccatggcaaagccgttcttgcggtaattcagttctcgtgctgcctcaagcactttagccttggtcttggcactaaccttgctatccccgctcagcgcataggaagcagtcgagagtgctacacctgccagctttgccacatccttaatcgttgccattccacgttcgctccttctaaactaaaacaaattcaaggttacccacattttatacggtacatggttagaacaaccactaaatccttcattatcgtttattaatctttatacatatcatagcgatggatgtcaatcgaaacgtttcgaggtgttctcaaaaaaaatcctcgttcccatccttatggggccacggttgaatgcgtcccgttccaatccataccattagtgatggtcatgacacgtctttcaatctggcgctctataaacagttcgtgcctaatacaatgaaactggcagtaaacgccagattgaaacgtttcgacattttcattatagtcggtgttgatagcgatttcaaccactttatctatttttcaaataaaaagttgatttgttcaatctgtccatccacgtcactccgtttatagtatatactgcataatagtcgagatccgagaattacgccagtacaccaggggcatgagacgaatactgtccctgctgacttatgtaaggagacagttatctaatgaatatttccaagcctatttatcataaaaaattgctgtcccgctccgtttccttgcagaagattcagtccatccccgctgccctgttcaagctgcgccatctggtgcaacttcatgaccgtgaggcgttctcccgtacagatgagatgtggagcacacttcatgtgctatacgtcattactgctggccaggccaggctgatcagtgcagagggtaaactgacattaaatgcaggctctgcagtcgttcgacaagctggaaccctgcttcagcacgagaacaaacgcggctccctgtcgccagtacagggcattgctattgcttttgattccactgaaaatgaacagctgttctggcctttcggggtaccagttcccattgcgagtcgcactctcaccgacagggcagtagagctggttcaagccagtacggcaggccgtgattccagccccttcagaccacatatgcttttctatgagttactggatattttacgggatcatgtggctcattctgctcatgaagatcactcctggcttgatgccgtgctcagacatatccatcagatgtatacccatccgttaacccgcgaacaattggcacgggatgcaaatgtgagtcctgagcatttctcacgggagttcaagaaacatacaggtcttacgtttgttgaatatgtaactcgtctcagaatcaggatggctcaggaacatctgttgttcgcgaaccctacgctacaggagattgcacaactgacaggctacagggacaccttttatctgagccgcaaattcaaacagatggttggatcagcaccaacacactaccggaaaatgcccaaaaagattgtttctttgacttacaactatacggcttcacttctggcattgggtcacactccccacatgggtgccgtcgccagctggatggaagaaaaacgtggtgaacatgttcatgatggtcatgagcaatttgagcagcattccgaatatgagcttgttaaacatacggatctgattgcaaacgctcagcccgatgtcattatcgggtatgcaccacatcccgcttctgatgaactacgtctgatcgcaccaaccattctgatgccctttgaggaaattgattggcaggagcagcttcttcttttgggccgaattaccgggcttgagtccaatgcacaggcgttgttagatcaatatcatcaacttgagcaagaagccaatcatacgttagaccaacagatggaaggaacacgagggtccgccgtttgcatgtttatgattggagaggacggcgcttatatctatggtcatggctggggcagagcttctcatgtgctgtatcaatcgctgagcttcactccgccgtcacgtatggagcaggatgggcagttacttacggggtacgttcatgttccgttgtccgagattcacttgtatgccgcagatcacatgtttgtcacctttcctgaggaacctgccgaacgcgaaatgctggataatttgctgaatcaggaatcatggggcaccctctccgccgttcgtgaaggacgtgtatacgagattgatgccgacatgttctatggatttgatcccctgtccgttatggagcagttgcagcatatcatgcgtcacctcacatcataattgtccatgctgtagtgatcatagttgtccatgtacaaatatcacatcttcctctatgttattaatgagaataataatcattattgattatacacagggggaacaaaaatatgtttgctacaaaaaaacgcttttctggcttgcttcttatgctcgccatcattatgaattctggctgcatgtagtagcggaacaggctcgactgccactgaacagacatcggcaacgggaaccgaagcgacaaccggctctaccgagacgaacacagacacatcgtccggttcggataattcaaatgctacacggatctacaagtcattaagcggagatgttgaaattccggctgaaccgaaacgaatcgttaccgatatgtacgtaagtgatctgctcgcactgggtgtgaaacccgttggtgctgttcaatattatttggaaaacccgttctatgccgatcaggtggcgggcatagagagtattggtgatcgggcggcggtatccatggagaaagtcattgccatgaacccggatctgatcattacctactccgatcaggccagcgaaattgagagttatcaaaaaatcgcacctaccgtagtgattccttatggtacattcaccaatgtatatgatgaaatccgaggattcggggagctgatgaacaaatccgaagaagccgaagcatggctgaaaacgtacgatgaacggattgaagccgctcgtgccaaggtgaaaacagtcatcaaaccggaggaaaccttctccatccttgaagtatccgacaagagttattatggatatggagacaattttggtcgaggaggacaagcggtctacagtgctttgcaacttgccccactcgaaatcaccaaaaaagaactgatgggtgatacccaatggaaagaaatttcgcgtgaagttgttggtgattatgcaggggatcatatcttcttaaccgttggagagaacactaaaaattaccaaggtgactccatctggcaatccctgccggctgtgaaaaacaatcaggtgtatgagttgctggaagaccgttactggtacttcgatccaattgcgattcaaggtcaggctgaggaattcgccgatatgatcgtagaacgtgccgagcaaaatcgtaaataacataagcatgaatacaggtgtccggacaggctaataagtctgctcgggcatttgtgtcatattgaggaggacttacatatgcttcgccgttttatgtcttattatcgtccttacaaaagactctttatcttggacttctcctgtgccatcgccgccgctctgctggagctggcctttccactcgccgttaaccgggtggtcgatcaactgcttccggctggcaattggtccatgatcttagcggcgtgtgtcgggttgctcggcatctacctgctcagttcctttttccattatgcagtgacctattggggccacaagcttggtattaacatcgaatccgatatgcggcgtgaactgttccagcgagtacagaaacagtccttccgcttcttcgataacaataagaccggacatctggtctcccgtatgaccaacgatctgatggatattggtgagatcgcgcatcacggacccgaggatctattcattgccctcatgacactcgccggagctttcgggattatgctggggatcaactggcagttggctgtgatgacgttcatcattgtgccgctgatgatctacctgtcgctgtatttcagtcgcaaaatgtccaaggcgttcaagcgcatgtttgcggatatcgccgattataacgcacgagtagagaacaatgtgagcggcatccgtgtggtacaggcttttgccaatgaaaaacatgaagtaggacgtttcgttgagaacaacgaacgtttccggcttacaaaactaatcacctaccgtattatggcctggaactcttcactcagttttatcctgatgaaatttgtatcgctgtttgtactcgtgtgcggaacctggtttgttattcaaggaagtatgacttacggggagttcatcgcttttgtgatgttatccaatgtattccttggaccgatcgagaaaattaactccgtcatcgagacgtaccctaaaggcatcgccggattcagacgttacctggagcttcttgaagctgtaccggatgtagaagatacaccacaagcgaaaccgattccggatgtcaaaggagatattgctttccataacgttaccttctcttatggagaacacaaacctacgctgtctgaggtcaatctggatatccaggcaggccagacggttgctctggttggaccttccggcgggggaaaaactacgctatgcagtctgatcccacgtttctacgatgtggatgcaggacatatctccattgatggcattcccgcgaaggacatgacactggaatcactgcgctcccatatcgggattgtgcagcaggatattttcctgtttgatggaacgattcgagaaaatattgcatacggcaaactgaatgcttccgatgaggaaatctggcaagccattcgccgggcccaattggaagagctggtacaatcccagccagatggactggacaccatgatcggtgaacgtggcgtgaaattatccggcggacagaagcaacgtttatccatcgcaagaatgatcctgaaaaacccacctattctcattttggatgaagccacttccgcgctcgataccgagacggaagctgccattcaactggcgttgtccgagctggctcaaggccgtacgacattggtgattgcccatcgactggcaaccataagacacgcggatcgcatcgtggtggtggagaacggcagcgttgctgaacaaggaagtcatgaagaactgctcgcgcgtaaaggctcgtacagccgactgtatcaagcccaatttggttaaatgcaatgacagaacaaccctccctcttgtaatagaggtgaaggttgttttgttcatttcaggtatcctttggatttccaaaatcgttttgcaaatgattcagcagcgtaaggcagctccccattcagtaaatcctcattcgcttgaatgagcactttgcgtccatgttccagcaagtgaacggcatgcagtaactgagagccgccgatgtaatgaagttcaagcaacaatggatcttcttcctcgtcatcctgagccgagtattcgatcaacacactttccgagccgtccgcatgttggtgcagggtataatagtatttctccacctgcgtctccccttgagcatccacatactctcttccaatacgtagcatagctggctggggaacaccatcagacatctgacctgcttgtcgaaatgcataatataactctccaatccacagcccgtgccgatcatcatcataataatcgtcatatggctccacgacaggcagtgctaataaatcgtggatcagttggtgcggaattaaggaacgggcatactgataattcgatacagactgcaacaaggtgctccatccttgctcgcttaactgctgaatatcagcaggtgagttctccgaaaatacgttccattccgacttctcattgtttagataacgatatgctcctgagatcatccagacaggttcacccggttgtacgatatgtttatcaggagagttggaaccttgatctgatggctccatcttaagcaacaatgcacaattgtggtcatcctgaaaatacagactgcggaaatatccctccgtatgctcatctccatagaccgatactcggcaaaattgctcgtccaaccaaaattcatagctgttcagtaactcatcctcctctcttacaggcaacaaagatggatgagtaagacgctctatgttctcagcggtaatccgatgatcttcgaaccaatccggcgcatctggctctgattcatcagcatgaatgtactttcggttgattacaggttgtccttgttgcagcctctttaacatttcttctcgccaaggaaacggctctgtatcttcatcaatcacacattcaggaaccaataacgccaacatgtcaaagccccgccatggtccgagatcctcccattcttcaagctgacgcttcacattacgctgtccttgaacctgaatcgtatattgatcggtacttaccagcaatccaccttctacattccctctcactgtcaattctccatggttataatccccccagaacatatcctccacatagagattacctgtaatatatatttcctgcccacccacgatcatatagggcgttatgagattcccaagtacaaccagatttgaactggccgcgtcggaacttgtatttccaatataacgatccactgtcagatttccttcaactaagatcaaaaagggtccttcatccaacaacagttcactgatatgaagatcaccagaatgtaaccatacttcctcggcttcaaattcaccgttgtgcgcttcattctgagtgtacatccagctctcctgaggcaacttcgttttcatatcggcaaaagacaccttgtgacctatctgatgtatggacatgtactgacactcctcatccattaatatatggatagaatctatctaatctacagataggacaactatccattttcattatactagaggaaatatacaccattccataacaaaaaccctcacccgagtagaatgaaggttcagcttgtgaacgacaacagccccaagcccattaaatacatatatgatctagtccattcttataacttcccacccagaatggcattcgcccgttcacgaaattccaccgccgcttgctcaggcgtaattttgccaaacagcagcagatcatacaactcacgtaataccgcagtgacctctggcgcacctacgggatcaggcgggtccatctgagtgctgttatccgcaacccaatcgatataatcaaacacctgcgccagctccggttcaaccaccagcttcattcgctctttgacactggatgagacgggcacaccccgctcccctttgagcagcagattggcatccaaatcattcacaaaaaagctgatgaacttggccgcttcctccttatgtctggaattacccgccatggagaaaaacatgcctggcttcaagaacaatccatcctggctgtttggaccaggcattggggagatggtcaagggtttgccataacgctgagcggtgctgataaattggttggaatacccccaactaaacaaagcctctcccagataaaacgggtcgttatcaggctggccaatatctgatgtccagatatccggtgcaaaaataagcttcttctctgcgagctgctgcatcctgccaaagtactcaataaacaacccatcatcttcataccccaatctctcgccgtcctcggcgtacagcttggaaccgtactgtctcaagtaataggcgaaaaactgttcgggcgtaaaataggttcccaagtagatgcctttcccgagcaattgttcgcccatccggtcaaaatccgcccatgtccacgtatccgttggcaattcaatatcatgggcctttaacacttccggatcatagatgctgagcatggcgttaacccccaaactgagaccgtaggtttttccattcaggctaccactctccagctgttccttctcaatatctgtcgtgtcaatcagcccgctctgcatgtacggcgtcatgtcttccaacagttgcagcgaactgtactgggacagataggagatgtccatctggataatgtcgggcaacgcattgcctgctgcatgtggggcaagttttctccagtattcgttgaaactgctatattcgtattcgatgttcacatgtggattcaacttctcatacaggttgataacggctatcgttgcattgttgcgaaactccccaccccaccaagcgattcgtagcgttatcggctcttcttccacaatcatgcctggcctttgatcaaactggttcacgcagccaggaagagtcagcataaggcagagcatgcctatcattcgcatccatcttcccataacttctcctccttacctggtgatgggggtggcagcagcactgttactctcgttccaagccccggcttactttccagcagaacatcatattcttcgccaaaagccagacgtacccgctccctgatattcagtagaccaatacctgtgcctctggtcttcacttcaccgagcagcacctgttccacatattcgggttccatgccgggaccgtgatcctccacgataagagccagcttgccagctgatatctcggcatacactcgaatcagacatgatccaacctgtggttccaatccgtattgaatggcattctccagtagtggctgtagggtcaactttggaatggcacaccccagataaggagcgggcacatccatacggaaatccagccgttgccggaaacggtaggtctgaatggtgatgtaatgattgacgatctccagctcttccgcaatggtaataatattttgtttgaagctgatggaggaacgcagcaaatatccgagtgataacaccatactggagatttgctcctgcctgttctttttggcgagccaatggatcgaatccagcgcattatacagaaagtggggattgatctgcgcctgcagcgccttgaactccgtttctttaatgaccaactggcttgcataattttctttaatcaatgtattaatatgtgtaatcatcagtcgatacgtacgctgtagtaaccccagttcatccatgtgctggtgcgttggaatggacagattggcgtctatattctccagatccccatactgaacctccttcatctgactgatgagctgcctgatcggtcttgtcagacttcgtgcgaacaccataccaagcgcgagaacaaccagaatggcgataagataaacgacgatcagtatatttttcaaccatataatacgttcaaaaatttcatcataagaggccatattataatacacccagtcggtgtatgcggatttcttctgggaaagaaatatctccctcccatccagattcttgatctcatatcccccactgcctggaagtggattcagtccggcggacaccgcttctggaagctggcgataaggatacaccacatcactgcctgcttttaaaataatgtcactgtcctggctatcgatgcccgcatactcctcgacgagtcgctcgatattaatacgcagaaacagtatgcctaccggttccagggtcatcggttcataggctcgcacttgacgcaccataaccagcatcgggtcatcgtcatccgggtataaccagcgcactgcaccattggcctgctccgcagccgcaatcatccgatcatatttttcctgagatacggttagtgtctcgccatatttattgactcttcccctggaatcaatcagatgaacggactgcacatatcgtgcagccccactaatatgctcccatagccgatccgtgatcttttttcgttcaataaagcttgaatatgcgctatcgtcgtccagcaacgacttcaaggctctttgaatctgcgtatcggagatcatgtttaatgataacgcttccaacttctgaagttcaacatccactgtagacgaagaaaggttcagaagtcgggacgacttatcaaacagctgtttgtcatacaccgagtacgtataatacaaggacccaaacgcgaggatgatgacaaacgccatcatgaacataatcatcagaaacattttcattttgatgctgagtttgcggtaggctgtcatgaccaaagcgctcctttgaaccacgtgatactactaggtatatcacatacaggaaggtttccccaaagttttagcgctcgatttctcacgtattatttggactgatatcgatcatacgcagcctgatgaacctcaatcgcccggtcaatatccatgctcttgattgtttcggccatcttgtcaaattcggtgatcggcttctgtccgctaataatggcagtcatcgtctcattcaaatacgtattcacctgactcatgatggatgtacttgtggtcacctcatctgttgacaaacgaattggaggaagcgttaatgctgagcttgctttcatccattccgcattcgccgcacgctgtccatcgtcaaataataatgcatccaggtaacggctatcctgattgattggaccgtccataatggataaggcataggaagccagtgcctggtcatacgttagaccgttcagattatcaatgatggtatctgtgaatttgacaccttccccgtcacgaacatagctgtcattttcgataccaaagttgaacagatcactaccctcttcgctatagttgtagtccatccactgaacaatatatttcaattggtcttcgtctgcggaagccgtaatagcctcaccataagacaacactttagcgtccagattaaatgtcgcatacgaagttccatccggagatacaggccatggtacacccgtcacgttaaagttcggatccgtatctctcatcagattgaagtatttccccatgccgctgaacacaccaccctgatatgcgcctgccagattgctggtgaccttgtaatcgaaagctttaccgtcattggtcatgatctcgggatcaatcagcccttcctcgtaccacttggccatggtctccaagaaatcacggtagcccggctgaatcggtccaaactccaccttgtctccattcatctggaaaccaccaatgacaccaaatgccgcggcaaaatcatggagcttggtcaggttgcccggtccccagtttccggtgaatggtagctcatctggcttgccgttgccgttagggtcctgttccttaaaagccttaagcaccgtataccactcatcaatgttggtaggtactttgagatttaatttatcaagccagtcctggcgcataattaaacctgaagtggcattcagcttcaatgcatccagcttcagcagcgggaacatatagatcgttccatcgtcgagtgcaatctgctttttcacatccggatcggattcaataatccgctttaagtttggtgcataactgtcgatcagttcattcaatcgaatgattcgaccatccttgatcattttttctggtccaccaaccgcatccgcccagttataataaatgacatccggtagctctttcgtggagatcagcagattgaactggtcacgctgttgtccaagcggagggtgtgtgaacttcacttggatacccgtcagcttctccttttccttataagccgccatatcgccaaaattgttcaaggaagctgtcaatttggcatcattggcgcgccagtagtcaatggtaaaaggctcacttgtaatcggtagcggaatctcggtcaacgcctgaaccgcaggttctgttccttctgctggctctgcgttacctggttcattatcccccgtacagcccgccagtaaagacatggtaagtagcgatgacaacaggatggaccccattctttttttcacttaattcgcctccataggatacattttttattgtttcacagcaccgattagagcgccctgaacaaaataacgttggatgaacggatataccagcataatcggcagtgtggagataataatcgtcgcatatttgatgttctccccaatggcaaatccggtatcggcgccagcgcccatggcctctgtactgctgctgatcagaatatcacgcataataatctggattggatataactcctgactgcgcaggtagagcataggtccgacataatcattccaatggtcaaccgcataatacagcatcataaccgccaggattggctttgacaaaggcagtacaattcggaacaaaatcagaaagtcattggcaccatcaagcttcgccgattcgatcagactgatcggaatgccctcaaagtttgttttcataatgaggaaatagaacgtactgatcgcaccgggaataataagcgcaaagcgagtatctaccatccccagattttgaatcagcagaaaagttggaatcatacccccgccgaagaacatcgtgaacgtaatcaacttcatcaacgtttttctgcccatcagatcaccgcgtgacagcccatatgcagccagcgaagtcatgagcagattgatggctgtacccactacaacatagaacaaggtgttcatatatcccgtatagatgcgagtatcctgaaataccgacttgtacgctcccagctgaaaaccttcaggaatgagcatcagtgaacgggaacgtagcatctggtccgggtcgctgattgaagaattgaacacgtacagcatcgggtacaagcataaaaccatgatcaccaagagcagcagtgtattaaatacatcaaaaagtcgttcccctatagactgtttcatcgcttcaccttccgattaccatagactggttgagttaagctttctgctgatcgcgtttgcgataatgagcagcgcgaaattaatgacgccgttaaatagtccgatggcggttgaatacgtatagttcccctccaaaataccggatcgataaacaaaggtagatatgacatccgatgtctcataggtcggtgccgtttgcatcagcaatattttctgaaaatccgcgttcatgaccgcccccatacgcagaattaacataatcacaatcgtgggcataatgcccggcagtgtaatatgtaacagctgtctccagcggcctgcaccgtcaattttggaagcctcatacaattgaggatcaataccactgagcgctgccaaaaaaataatcgaggcccagcctgcgccctgccatatgttggacaggatgtacatcggacggaacatatctttttccgccaaaaacataatcggctgcagatcaaaaaagtcacgaatgacgttaaataacccaccgtccagagatgagaacgttttcaacattccaaccacgacgacaaccgaaataaaatgcggcatataactgatggtctgtactgcacctctgaaccacttcttccggacttcattcagcaacagtgctagtagaatcggagccgggaaaccaaacacaatactgtaaaaacttaaaatcagtgtgttcttaatcagtcgccagaaataataactttcaaaaaacatggtgaagttgtcaaatccgacccattcccctgccaagattcctttgatcgggttgtaggattcctgaaatgccatcagtagcccgtacattggcccatagctgaaaatcagatagtaggctaccacaggaacgagcatcagataaacgtatctgttgcggacaagttcctttttcaccgaactccatttgccagctggcttcaaacgcccaggttcaatcccccggcttcgattcagctccatccactcaacctccactctcgatgttcattcactaacatgacacttctaatgatagaagcgagcgccttttcttcccatgctcatttccgataaatggatgttcaaaaccgagttccgtccgacaaaaaaagaccctgctgccgatgaatggcgtacagggcccgatcacagattagatgtagatcggatataaagattagctatgtagaagcgacagcaacgctgtcttagggtacttttttatactcggaaggggagaatcccgtgtatttcttgaacattttgctgaaatacggccagttggcaccaaagcctgtctgttcggcaagcgaggatacagtgcagttcccgtcctgctccagaagctccaacgctttacggatgcggtagcttaacacatagttcgtaaatttctcaccggtttcttttttgaacattttgccgatgtagtctggattcatgtatatttccccagcgatggactggagtgttaatgtctcgtccttgtagcgtttctctaccaactgtttcacactgcctaccatctgcgattgtctggagcgatgttgttcatagcgacgcagggtgatttccttgccaacggcaagcaaaaactgttgaaaagaatgcagggtgctggattcaatcatgcctggcatctggtccatataccttttcatctcggcagagccactgagtcgaatcatctccataaacatctgaataagataggacttcgtttgggatatatcgtatcgcaagctggcaagcagctgaaacatccggttcagctctgatcccacttcctgccagtgtcccgccttgattgcagtaaccatcctctccggatcgtattcgaattcaggaagaatgcgttctccgggagagtaaatatcccgctccataataagactgccctcaccgaggtaaaagcggtaattgagataaaccagcgtctgcatgtacaaatggcgtgcctgcgagaggtctcctggctcgcttagcgctatcgtgagatcatcatgataatatcgggtaaatgtggcgcgaatctcatcgatattatggaacaactgtgtttcagacaacttgtcctccataattagtagcacatgccttccaaccgtggcacttaatattggattgtgaaaaatatcttcggcaatgttcttcaccgcgaacaagtgcaaatactcatgatccccctcaatctctaccagcagcaaccgcacacgctgatcctgaaactgtacatcgaataattcctcgaaatacttccattccttgaccccgtatgttctgttcgtgactagctctttcagaaaatattccttggcatgtggcagtactcgctccagattatattggatcgactgcacaaaacgctcctgatcggttaactctcgcttctcactgaccaattcactgatagcctgtacaagatgctcctcgctgcagggcttaagcaaatagtgcttcaccccatactgcatggccgttttcgcatattcgaactccgtaaaacccgtgagcatgataaacgagatatgctgatacttctctgccacagcttcaaccagctgtaacccatccattcccggcatgcggatgtccgagatgatgatatccgggcgttgccgctcaattgaagcaagcgcttccaatccatcttgagcaatgccgatcagttctgttcctaatctggaccagttcaccacactggagatcccgtccgagatcataaattcatcatcaaccagcaaaaccttgtacatcgtatgcatcctcctgcctttaaccagttccattctattatatgggcattatgcacaaatagaggggaggacattgaatgacatggaattgcaccctaacaagtctgatttctgaacattcatggctcatctcatcggaaaaatcattcgctggcaagctattggagttagtctctgtaaagacaaaacaaccctcaccccgctactggggtgaaggttagcctcgcttcattttacaatatcatcagggtatgggtacggacggagttattccgttacaacattacgtatccatcccatattccttcacttcacgattacggttcaacactgcgtgcagcacaaaaccaagtaccgcaatcgccgctgtgcctgttgccagccacgctaccggaataagtccctgtttgtcatacatgacccccatcgcataggggccgataacccgtccaaccgcaccgatcccacccgatatcccgatgtaaaaaggtgccgccctgcccgcatgctccgagataaacgcaggcgttgcaggggaaatcaacatctctccaaacgtggcaagtaccattgcaagcaccatgcctggatagctgtacatggtaatcatgacaatgtaggccatgccatagaataccgcactcgcggtcatctgggcagtggaggtacgggccatggtccgtttcacccagccggtaaaaggttggcccacaaagatcagcaccccgttcagggtccagagcagaccgtacattcttttttccataccctcagagatgatatacggggaaacacctgtgttccagatggagttgccgaataacaggaagagtacgcccaagctcataaacagatatagtcgggtattccccagcaatgcccagacgcccggcccatcggggacggttttccgtttcgtcagatgtacttccccctgatccggttcaacccgcgacagataataccagaagaaaattgcaaatccggctgaggtcaccccgttcagtacaaagctgaggtggtaggaaaagtcagccagaaaaccgctcaacgccgtaccaatcgccaccccgatattgttcgccacatagataatattgaataattcaccgcgtcgctccgcaaaccggaagccaataaaggcttgaatcgctggtagcgacaatgaactgaacagcccaatccagcccatggcacatataaatacgacccaatacgcactaatccacggcagcgcaaacaaacctaatgcattaagcgccagtgaaccaatgatcagcttcttcacacctacccgatggtacaacgaaccaccaagcaattgtccaaagatgccacccagtgactgaatgaggatcacaaaaccggcgttggccatcgttcgtccaagctcatcaaacacatacatggtggtcagcggccacatcaatgcactgccggttgcgttaaccagacttgctaataaaaatattctcacttcttttggatagttatccagccatctcatcatctctagttcattctccttagtacctctgcacatacaaatagccataaaaaaatagacctttgccctgacggcataaccataaccagccagagcgaaggttttatgaagtgttacatcaattgctctttaatcctgctcaaattctagcctttgttcatcttacctcaaaaaaattacgccgcaagcacactcattgacgcttcacttcaacagtggccgagaagaaggtagccccgttccccatgtccgacaaccgattggacgtcagtgaattcgcccgctgcttcttcccgtcaccatcccaccataagccttggctaatcactgttcccggcagcatggcttcactcaccttggcggtaagttcaatgcgcccacgatcattccatacgactactgcatctccatcttccaggtttctacggatggcgtcctcggggtgtatctgcaatagaggcatcttttccaaacgctgatgtttggctgaattaccaaaggtggagttcaggaaattatggtttggcggcgacaggaacatcaatggatacgtgtcggcaggtccagccggattctccccatcgtatccttcaaccaaagcactataggtagggagtggcggaagccccctctgttccatcgtctccgaatataattcaattttgcctgaaggtgtgggcagctgatccagatatgtagcatgtggcgtcatatccagcttcacgaatcggtgttccttcagtccctccaacgtgaccccattcatgtaggggttgcctgtgccctgaagtgcgtcctcaatcatctgttccggcgtttctccgaagattgcaggatcgtaccccatagcctgcccaagcagtgagaacagttccacattgctcttgctctccccaatcggtgcgattaccggctcttgcagatgaacgtactgatgccaataagaggtgtacaggtccgtcgcttcaaatgaagatgtggctggcaatacgatatctgcatacttcgccgtatccgtcatgaacagatcatgcacaaccgtgaacagatcctcccgtgcaaaacctcgctccacccgctcggtatccggtgccaccaccagtggattgctgcagtagaccatcatcgcccggattggctgctctgcttccagcaacgcttcaccaatccggttcatgttcaccactcgcggctccggattctgccgcagctccggacgttcgagcgcgtcgctatttgtgctcgcgtagctgttggtgcgaacagcaccgccgccttgcttcagccattgccctgtaatggcaggcagacaagcaacgctacgcacgttcatccccccattatcatggtgctggaggccattgccgatgtgaatatgggctgcctgtgcgttgccgtatagttcggccagctccacaatggtttcctccggcacgcccgtaatgcgtgcaacacgttcaggggtgtaactgcggacatgatcacgcagtgcctcatgacctaccgtatacttttgcataaacgtttcatccgttagtccccgttcgaacaacacatgcattaatcctagcgccagtgcactgtccgtgcccggatacagcggaataaaccagtcgccccactgggccgtgcgattgcgatgaacgtcgatgacgacgatcttggcgccttttttacgggctttctccgccaaaatgacctgatgcatatttgtactgacgatattaccaccccacaccaggatgagatccgcatgctccgtatcttccggcaccgttccccgattggcgcccatcgtatatttccagccggtatttccagcggagttacagatcgtctgctccagtacactcgcaccaagcgcattgaagaaacgccgatccataccgtctacgccgagaatgcccatgttaccgtaaaagctgtagggcaggatactctccgggccgtaggtttcggacaatgcagtgaatttggtcgtaatctcgcgaatcgcttcatcccaactgattcgttcaaacttgccttcgcctttggctcctacacgtttcatcggatattgtagacgctcggggtgatacacccgctcagtcatatttctgactttattacagatagcacccttggtgatcggatgatccggattgcctgccaccttcacaattttgccgttctctttatgtaataacagaccacaagtgtccggacagtcgagcgggcacaccgccgcaaatacaccattctcctgatcgatcatcgtaaggctcccctctataaaagctatccctatatcatatcttcttcgaggttatcgcgtaaagagaacagtatgtttttgcttcatattcactgctatagcggctttaaaatattttcaaaaaaatgtttttgagtttgattcaacttcagaattcaggggtaaattaaaaataaggcattaggctagtgtttccccacttcctcctcatgccatatcatggaccactcccgaaattcgccatgaacaggtttcgttcccccgaaccttgtcatggcgaatttattttgcgttaaactccaacaaggaccccatacaaaaaaacgatcccgccctgctccatcacagcatattcgccataaaccgagcaagatcagaatcgtcttcacttctaatatacgtgtatacatgcctcgctgcgcccgctatgcttgtttgctcaacatcactctagcctccgtctccacaggttcgatcgacgtcgccatctctggtttcacttttggctcggcttggcgcaggtacaccacccaataggctgcagctacaaacagagcaccaccagtcagattcccgagccataccggaatgaaattcatcacatattgaccccacgaataatgtccttcaaagattgccgccgggatgaggaacatattggccacaacgtgctggaatccaattgccacaaatgccatcgttggaaaccaaatgcccagtaccttgccactcatcgtatccgaagcataagataaccacacggccagtgccaccagccagttacagccgatgccagagatgaaagcttgcaggaaaccatcatgcagcttatgcccagccatatccaccacttttgccagatatacaccctctccggtcagaccaagcacatgtccaaacgcgtacgcgacaaacaaagctccaacaaaattaccaatcgtcactaaggttagatttttcaacatactacccacagataattttcgtgcaatcgttgcaagtggaactgccatcatgttgcccgtcagcagctcgccaccacctatgagtaccaagattaatccaaccgggaacactgctgctccaatcagattgaccagactcccccactctgctggcgcagaagcaattacccgaatatccaatagaaaacccagcgcaataaaagcccctgccagaaaactgagcaccagtacagaagacgccggatattgagccttcttcatgcctgtttgcgccgtatattgtgcaacctcaagaggtgtttttgctgccatatcattcatcctctccttcattgttcatcattggataaaaccatctgaaattcattagttatgcgttgaataccacatcctaattgtatctcggtcctaaacataactttgtgcaaattatcacaatgttacttaaaaagatactttaagagtgtcttggaatagttatgacagcaagagtgtagtaaggccttttgtagctaaaacaacaaaaaagaagactgacgatatactcgccagtcttctctttcctctataatcgtccgccttgtttcgtaatcttggcagttattgtacacctcttatttacggacaagcatgacttatctttgtatggcgtttatcaagatcgctgttcaaccatctattctgcttccttacaccattgctggtgcttttacttctattggaggcagtgcttgcagaccagccgtgttcaggaagttccatggtttgttgtaatgtggctggaagaaaaagtcgatgaaggccagctcatctacggtcatattgttttggatgcagaccgagatcgtattaatcgattgggtcagatcaacctgagacatcacctgtgctccaacgatccgacgagtagcctgctcatatactactttgagcaacagtttctcagccgttggcatgaactccggacggtagctgtcttccagtaccacggattcaacaatcaggccttcgtcagcagcagacgtttccgtcatcccggtacccgcgatattttgctcataaattttgatacccgatgttccttgtgtacccatatacggtgtcgtaggacgaaccaggttacgggctacgagtgtacccatccgcaccgcgttggttgccagtggaatgtaagatgctttgcctgttgggttgtaatgaatagcacagctgtcacccgcagcaaagacgtctttttgactcgtttgcatgtatttatccacgatgattgcgccgtttggcagcatatccacttgccctttgagcagttcggtatttggacggaaaccaatgcacagaataaccagatcggtttcgaactctcctttggacgtgatcaccttagttactttgccatcttcaccagtaaacttctgtaccgtttgaccaagagccagcttgatgccgcgtccagtcaacgtatcttcaatcgcatccgtgaattcagggtccaagtatttgttcaaaatacggtccacactgtcgatcagggtaacttccttaccgttcatctggaaagcctcaaccagttctacgccgatatatcctgcacctacaacggtaacacgtttggcatctttggctttttcaataatcgtgttggaatgattgtagtttttgcaaagtaaaatgttatccatctcgatgccttcaagcttcggaacgacaggccatgaccccgttgtcacgatcagtttgtcaaacgtatcttcaaattcttccccggtttgcaggtttttagcctgaagggtatggcccttggcatctactgctgttacttcatgaagcatcttggtttcaacaccaagctctgccagttgattaggcgaagaatagaacaaaccgtcagggtctttcacaaccccacctacgtagagcgcaatgccacaagataggaaggagatattgtcattgcgctcatacaccgtgatggtagcatccgggtacaatttggcggtatttacgatggctgcggttcctgcgtgtgtacatccgataactgcgattttcattaaaagttcctcctcgaaatatataaatgagtttgaatataaggttgttatggttgtgaaacatttcacttcttgttcgaaactgtgtatgtgatttatttcactttatacactcattataatgtgatatttttcacattgcaataggttaagcaaaaaaagtttgtcgaaggaggtcatttccctgtatttaagcctttcttcccttcattgtattgatttcattgtccccggatttgggcgggattatgctatgtaatggcttccgtgatccctgtatgaacgcagtgtggacgtataaagttagaggcgtctcctgtattcttgtttaacttttacaaaaaataaatggcttcaattttcattacagagttgatctcatggatccaactcctacctgtgaagagaataaatctgcgtatataaaataatcaaagaagcccatccttgcttatgcaaggacaggcttctcaaacgttcatgtattaaccgagcaacttctcgatatctgcaatcattgtctccggagattctttcggttcaacacgacctaccacttcaccttcgcggttaacaaggaacttggtgaagttccattggatgtcgcttgtttcacctacgccaggttgttgctccttcaggtattggaacaggggatgagtgtcctcaccattcacatctaccttggcaaacaccgggaaattcacaccatagttaatctggcaaaatgattctgcttcctcacttgtacctggctcctgccctccaaactggttacaagggaaacccagtacaaccaagccttgatcgcgataacgatcataaagcttttgcaattcaccgtattgcggggtcagcccacacttgctggctgtattggcaatgaccaataccttaccttgatacagatccagtgagacttcttggttcgcggtggttaccgcctgatatgaatatacggacatgactgattcctcccatgacatatgttggtttgggctgttgcgagcacgttggcataaccaatgaacccacagcctgtcctattattatagacctgatccgatacgattaccaaatcccgggtctacctgtcccctttgctaccatgcgttgcaaatttcccatgaatgcaaaagagccgcgtgcaatagcgcacagcggcttcattctataatgtaaggaccacatatagcccaatttattaacttcctgtcgcttgaacacgtggttctgtccgtcctccagcatgaaccatcgcactgttcatgaccagctgctctggcgtcttcgattgctggcgttcgcccgcaagagcgtaaggcaagcagagcggtacaccggaacgcggatcaatcacgatatctgcttcaatgttgaatacttcacgaagtacatctgagttcataacttccacaggtgaaccatgagcgatggctttaccttttttgataccaatcatgtgatgtgcgtagcgggaagcatgattcaagtcatgcacaaccataacaatggtacggttggctgtggcattcagttgctccagtaattgcaatacttcgagctggtgagccatatccaggaatgtagtcggctcgtccaggaaaaggatatctgtttcttgtgcaagtgccatggcaatccaggcacgttgacgctgtccaccagacagttgatcaatcggacgatcatggaattctgtcatggctgtcacttcgatagcccattcaatcatacgtttgtcttccgcacgcatggagccaaatcctttttgataaggaaagcgaccatacgataccaattcagtaacggtaagaccttcaggggctgttggattctgtggcaaaatcgcaagttgcttggcaacttcacgcgtggactgtttatggatggacttcccgtcgagcaatacattacctgcttttggagccataatgcgtgccatcgttttcaggatggttgacttccctgaaccattggctccaacaagtgctgtaatttttccttggggaatctgaatattcagatcctctacaattagtctttcctcataagcgatatccagcttggtcgtctccagacgaaacatgcgatcatccctctctcatttatcccggttatgtaatccggctatgacaacaaaaacgaaattgtaattctgtgatttccgacgcaaatatcttctacactaaagatactgataatcattatcatttgtcaacataaaaaaccaaattttcttctcttttcgtgctttatttggtctttctgtagcagagttcccgctcttttcccaagtacacatgagatcttttctcattcattccgcgcactttatcacttctgactgtttttcaaactcttgaatcgcaaattttgtgtctgaattgtgaatgtggccactccgatgacagaacaaccttctgatcgctgttatccccagatttttttatccttttttaaagggtaaatccggggataaaggcgaacgcttcacttcttcaggttatttctgtcctctccgtttttgtgtaaatgttagttcaatctatccagccgccatatcaaataaaaaaaaagatgaccttgaaatctaaagttcaaggtcatctcacatacgctcgtttaataaggtatgaagtcagcattttcattattggattaaaagacacttaatgaatctatgcaacatgttcatataaaataacttacagcttcggctgtggcatcaattggatcaccgtcatattgccatgcgtgctcttcacactgacaatgctctcggcatccatattcgctggaagatcgatctgcaatccatacggatagagacgatctacctctccaatagacatctgtgcaggagtgttcgcatcctgttcattggatacagatgtgtcaggcgatgtggaaccagtagcttgatcggcatccgtaccttgatccgtgtctccactcccagcattagacggtgcattcgtccctgtatccgttgttgtatcagtaacaggatctgaagtggaatcacccgatgttgaaggatcggcctgctgatcgccatcctccgtctgctctatgtttcccgctgaagaaccatccgtgcttccttcggaagtacttcctgagccaccatcggaaggaacttggttatctggctcctcattccgattaaagctctcccacttacctgtagcatccaactcctgagtgctatcatccttcagcgtcaattgcagcgggccttgctcaaactcagtgcttcccgtatcattcctgaaacggatcaccagttgagcaggtgattgcgtaccctcctgttcactcgcaggaatcatataagcaatctgctccgcgagctgcacctccggttcagccggtatgacaggctcctgggtagatggaggggatgccgctggcggctctacagaatctttcatccatgcatatgtaccgccagcaatacccagaaccaggatcaagaggattaatccgaacagatttttccttttacccgttagcatccgcaccagtggagaggacaattccgtcttcgcacggtcatagaccggcttcattgtcttgctggctctcacgtaatacggtttgaaagctgacttcgacttgaaagcttcacggtcatgggctttgaaatacgccacgatggcatccgcatatcctttatgcgcattggaaccccggacaaacatccgatgatctcctgaccattcgaagaatggatacagcccttcagcacgacttgcattggtgcggatgaattcaatcaggccaggataatccaaccgattgctgccgcttcctcccctataaaaagccatcggcaaagcttcatatgccgcaatccccggatgagcctgcagctctccggcaagccagcgacgcgtccagcgttgaagttcattgcgttctgccagggaaagtgcctccaatgcctcttcttcattcccctcgccactaagccacactctcgcagccagcatcatgttcgttcgagcagatacatcagaaccctgacgtgccgcccaatcccgaacctcattaccatgctgcaaaatatcaatgcttaatagctgttcacggttaacccgttccagatccagatcctgaatcataaacaggttaatgacataagcaagcttgtctgcaaggcgggttaactcctcctgatatgccggatcttgactggcagacggagatccccctttgcgattagggcgggctgtagctccagattgaccaattcgtgccgtaatgcctgtatcataggtgacatcagcggatacccgatccagtatgttaacacgctggagggcttcattcgcagactgtaccggattaggcgcagaacataaccgttcacgcagctcattggctgtccgctcctgcaagaagctgtagtggatcgcagatggatgggacgtaacccatcttcggatcaattcaacaacgttcgctgccgattccgtgcgtttcagctgattgtccagataaggctcgaacaacagcttggtaagagattcattggccagcactttatcaaagaaagcccgattcagctgcggatcccgatccagcacaccatacaattcctgcacagctcgcatacgcttctgggcgcgggcattattcacaccgtagataaaataatccacaatccgggattgcaccacgggcgtggcaacactgaaatattcgccaatgcgagctgcgacgtcttcttcgggtacgttctcacgcttcacgctgtccagttccctgctgagcaaggtcaggaacagctcgttcagacgggaacgttgctgtaatccaccatccggcttcaaataggtcagcaagccactcaggacatgacttttgttatccagatagaggtcttccatgccttgttcaagaccatagaacaccgcaagttcgccataggcttcaatggaaagttcccgcccgggttccatgccggacaacatttcatccgcaaacgtatagaacgcatccgccgccgcaggttcctgcaataaggcccaagcgaattctgcataaggtaacttcgccacagatgcatccgcatgtgtcactctgccggataccagatcaaaggtgaaatccttctccgtattccggtctttcggacgtaacgttcctcgctctacaaactgaacgtgaatgcccttcttggcctgtggctccttggcaaacgtcatgaatcccagctgccgccggaatgcgtagggtaaagccgtgtacagcaaacgtaacaatcctttggcccctgcggtcacttcctctgcgggaaggtccagcgcaatgtatacttttctacgtgtcgctacagactgcattaccgcatagagcaggcgcttgaacagcacttcgttcattttcaaagcgctcagcacttgggttggtgatcctacgccagcatcggtcgccccaccctgtccgctccgaggtgatataggcaattcagcaagtgctggcagaactgtaccttgttcgatgtcataggacgtggcgaacacggcatccagccagccgccttgtttcatctgctcttccgagcgttcgggagacaagacgtaattatgtgcaaaaaaggcactgcgcagcccggtgaaatccgcagactggtacacattttgcccaaggattgtctccccactctccagatgaagcaggtgaatggaagccggaaacttcgtctcgtccttctcgctacggcctgttagctccgctggagcgtcatagacacagtaggggtgaagcacttttttgataaaagaagggtccagtcccggcgatgccgcaatcgtatcaaacccctctgttgtgcgaaacaccccgcgccgctctcgggtatacagctgttgttcaatgggcggggttacggaagaacgcatcatcccactctcccctcaatgtacttcagcttgtacaatagccataagaagggttcatccacgcgaatcggactaaccacaccctgcaatttcatatccaccggattgctacccagcgcagagactgcgaaataggctgtatccttgaagtacacatccatcgtgcccttgaatgggcgatccaccttctcgataaaacgccggatctccccgtcgatattctcgaactcggttaagtcgaaccaatcgcggtgcaccatgttgcggaagacattgctgttggatttgatataatccccctcttcatccttgagggaatgcagcatgtcgcttttggtgagcacaacagccgttggaatattggtcttggctttgtcctggtacgcgataaaatctccaaacatcgtcagcaccacatctcgcggttcatcgtatcgtggtgtccactctcccggctcgttgccaaggttaatgcggattttgtcccgaatcgaacgaatctgaagcgggtccaccataaacagaatgcctgccgagttcttgatgtgttgcccgtgaagtccgagataatcctgctccaccataccttcacccgcaacgtcaaagaacaccagtgtcagcggcgctttatcttcgtccttgaacacaaactggaagataaacggctcctgcaacttttccttctgtgtggaatccagcagatcgccccgttcaaacaatggttcttcataatccgcacggaaccggcggctgatctccgcattcaatggcatgcaagccgcgtcaaaatgatcggccgtataatgctgcaatgtatgaattaatgaagtcatgtagacggatttacctacctgggatgcaccaatgatggatatgatattgctcggtgctttacctgccgtaacaggcagctcgttatgacattgcggacacaaccggcgacgtgtaacgacaccataccgatcgttcagccccatcacgatgttatcggaataaatccggtgttcctccggtacatcatgaggtgccaataccgcctccatatcaaataccgtgtcgagtccgaacctttcgcgataccgattcaacttcgcatcttccccgagtgcgtagtcctcatcatcatcgcggtgatgggcggcgcggaacaccacctcttccggtgaaaacttgctgaaacaataagggcatacaatatcataaaacagcggacgttcctccggctgttgtctcttcaaaaaccgactaaaaaagctcatagccactcccctcccctgatcagtcagactaaggtgatttacacttgcactacgatgacagagtaaccttccaatcgctagtccaactatctagtctgatataagccgataggcgactccatatttcggtccgtccgtgaagaataatcgcacataatcatccttggcaacttcaacgggcggcatctcatttcttccgggagcaaaatcactcacaaaaggatacactgtaccatcttccttattcagcggaaccccgccctgtttgcgaacataacagagggcttcctttggaacaggtacttccgctgtgacggtgatcaatacactttttcgtttctgaaaaaaaccgctcttgtagcgaatggaaaagcggatatccgccttccctgcgcttgcaatcaccatgttgtcctcgtctcgttgacggatcagtacaggtccctcttcctccatctgacacacatacacggtgtacttgatggcaccaaaacctgtaatccgatccgtgtaaccattgctcgccttatattcctctctcgtgtacagcttcagcttgccctgtgcaggctcttccccggtacgatcatcgctcatcatatccagctccagccgttccacatacacagcttctacccgttccggccagagccagcgaagtgtacaacgcccttcgtccaccgcaagtgtcagttttcgaatcaagggtgtcgaagggtctgcatccgtaaaccgcatttccattgacctcccgacgttagaatcctttgctgcgtgtatctcttggtctctgaccaaacccttcggcagaagaagttccgccgccagcttcacgacgacccctgctcttccgcggcgtgttctccttaatcggaacaatccaggagaagagggtcaatacgccagacaaaatgagcatcgcaacgagtcgtacaaatgtatcccccacgttcgaaccgtcgagtccccactccagcagaagccctgccagtagacccgacaccgcaccaccaataccaaagctgagggcgagatgacggttatcaaatacaagtccgagtgacacacccaatgctactccaatcagtaacacggctgctacacggaaaatcgccagataaacgctatgctccatcatgcctgtacgctccgtcacaagcgtccgttcatcaatcgtatcgtagatctgctggaatgccagattcagaccaccggaatccggtacatcatagtacatgccacccgtttgctgggcaatattacgcagcagatccgtacctgatgggtccaccaggcttaggccgactgtattaatagagatctgttcgttgttatattgagacaaaatatcggtcgtgtccgcttcactgaagccatcggataacaagatgacgacggtaccgcgtttcgggtcctgtttgccctgaatctgctccatgccttcccgcagcacggcatcaaaattggtgccgcccgaagtcgtgacaatgccatcgattttgctataaacctcattcttggccgcttcactatccagcgcaataaacggctgtaacaactgcggctggtcatcaaacgtaatgacagctacctgtttgtcactctccatttggctgatcagtgtcttggctgcttcaaagcgtccgttatccggatctgtctcgctcatgctgcccgagttatcgatcatcagtacgatgtccttgacttgcttcacaccgcccggattaatctgatacaacaattgcagggcgagtccaacaacaaacaacagagcgagtgttgccggaacaagcaatttccacgacagtcccagataccggagcttccatgaagcgccattcagcttgggtgagatcatctctgcgatcaaacagaacaatccaacgctcagcgccagtacgccaaagtataatcccatcagcaacagacgtggcatctccccaagccattgacgcagcatgatttctcctgccgcaaagccgactgccccgccaatcaggctgaacaggaccaggagaagattgatttttcgctgcatgtctacatgcatcctttccataccagccctaagcaggctgagttaatacaatattggtgttggttataggacaccgccagacgtcttaacggatgggtgacaacttctccaccagacctgcggggtgaagttcatagccattttccgtatacgagtcgtaatataccttaccgttccgatacaccatgagatcttccagatggaaacctcccatcagattcagcttctccaccccactactgcgttcttcgtacaccacacccaacttgtagatacgtgacgtctcttcggcatgtgccgcgtagtccatgaaagcactatgatggtcaccaaagaaatacttttcttcatatcgatgttcctgcgtataatcgaatacccggacccgaacaaccgcctgatcctccagcgtgtggtacaacctgcggaacagatcatcccgggttaatacgtctttatctccgtaggcaatcgtaacgttagcacgctgcaacagttcttcttcaaatggcaatcgcaatggctcggctgtaagcagcaacgagtgacatacctccatcaaccgtttcagcagacgatcatcgccttctgtggcaagccggttcatgtctcccatgtaacggtcctcaaaccatacatcccgtccgcgcttggcttccaggtcgatgattagctcttccgtcactttgccgtagtactccatcacgttctggccgatgtattcatcggcagcagcgatactttgggcagctgtctctcgcagtgtgcgttcaagcgcttcaagtgctgctgtgacgtgacgactaaaacgatgaagttcttccatctccgtatcgtagatacgcagcagatgtaattcattttccagtcgcagtaattctacctttggtacatacactcgctccagcatgcagtcaatcagattgcgcacattctgtttatcacggaacaacgctcgtttgaacgactgatcttccactcgctcttgctgacgttgctccagtagagcacgtgccgattcaagctgcatcgatttatcccgaatcagtccgagcagcgcttcacgcacactgccaggctcactgtcactccaggccgcccactggaagtaaccaacctctggatgctccgcgcgggaatgttcagcatgacggcgcagggaaccgctagagctgcgctcgcgcacacgctcttcgacaagacggacaacgttatcgcggaagtacgcttcagctccttgtccaaacaacgctctctccgcttcacgaagtgagagcggcttcagatcagagaaactgacgttatgcgtcatgatgccgctcatgccactaaccagatcttcattgggcagcaagccttcgactttgcgttccattgaagccgcgtccagtccaaagaaagcgagcttgtccttaatgctccaatccggctcttgccgcatgcgtgcgagcagataccgatacaggtgatataacaccgtcagggcaatcggcttgtttggccgcctgatctcggcaaaacccgcacttgcataaccatgctgatcagaggtagtacgaatattgtttttaaaggatgtattgttgtacgtgttcgctcccgtgcttgaaacgctacccgagtgatccacatcctgcttcctgttcttcagcaggcagatgcggcagatgatctcggcattttcgatccagccaccgggaacgccggttccacgctcatttttgtcggacaacagatataccagatcaaacaacggtgacgcgggatgtgtaaccggaatggagatcccatcctccgtcaccagcagcttaccgctgaacgtgtagtccagcgactgcatataatccagttcccgcagaaaagcgaggcctgctgcgctggcatacccgaaggaatccacctgttccatctcgctgaccaatacatgcagatccgtctgcaccgacttgaaggcttgggacaaaatggtctccgtcagcttggtgagctctggcaacaatacattcaacggatcatccgctctggttaccaccgtaacgtaaatccgatcaaatgacgagtataaccgtccatattcggcaattcggttactgacccgacgaagcgtacgattcagatcgtagagcgcctgatccgattcgtggaaactgcggtgtacatccttacgccgtgttttggacggtcgctctgtctgcccaacggacaaaggcaagcggtgacgagtcacctgaccatcatcggacaagccaccatttctcgtttcacccggacgtgcttcctgatcttctgtcccgatctgaacgtagaccacaccgtctccgttatcccacttcagccgattgatctcctgcacggcagacacggcaggtgcaaccagatcacccacaaacaggaacagtgccgggtaatggatactgctgcgtccatcacccaggctgccttgacgctcctgctctattgcatactgcgctgcatacttctccagatcacgcttcagggtattgttcgaattgaactccatcccggccgccatcttacttcagccttctgcgaatgtcgttcagcttggacgacattgttctgtagaactgatagatgtcttctccgttagccagttctacccgctcgtattcgagacgatcgcgcgattccatgaacagcgcagccagatcatccagctttgtcagcagtggggtgatatcctcagaagctgtaagatcgttatcgcggcgggaggctttgcgcagcaatgtactgcgatccttctctgccagaccgcggaagttgccaaacacttcatactcggcaaagttacggctcttcatcaagtttgcgaacggctcccatgcgtcttcttccgggtcacggtcatagacgtagagggcaccttttttgacgatagtatcggtatataacgcttcgatgaagcggtcataccattgctcttcgtcctggtactgggcaagaatgccttcgagttcggcgacttttgccgagatggcattcatcttcgccagttcctcacgtacgcgcgcgatcagctgcggagagcgtaccaggttttctttggccatatcttcactaatactgccgaaaatatccttaactcccacacgtggcaacccttcggattgcagacgttttagctcgatcaccgcccgcttcacttcgccgaggttcggcgtggtggacgtgagacgcatgtcgtaggctcccagtttggcagacagatcaaacgcttctgttgtcacaatcgcataccggttgcttgtattctcatcaatggatttggctgtcacaatgttgtatccaagcgcctgctcaaattcgttacgcacacgggcgttatactgcttcacgcgggcgttctcgtacacatctccccatgatttctccggaatcggagacggcagataggtccagttgtttttctccgtttgtaccaagtgtcgaccaatgccttctttgtccaaaatggtacgttcataactttcctcatatactttgagcggagtatacacaaagagtggtaccccgttgcgggtattcagccagaatatccggttacgcacttcactttccttaacggtaaaatgagacttgcctaccgcattgttctgataattgcgaatccctttcaagatgcctggcgcctgtgccggcaccgatacaaatccccatgaagggaaatgcagactgcctgtactgttgctcagattgaacaccggaacagcctcatcatccaacttgccagcaatgaaacgttccacgaatttctcgactgactcatcctgaccgtatttgatcaccaggaaatcttccatggaacgggtaatcagatcaccgaatttctcactcaggaagtcggagatggagctgacgatatcaatctcgttttctttcacccattggctggagttttccagcaattcacgagagaagtcacggatcagatcatctgtatcacgcttatccaacagcccgtccaccacactgacgatatccggtacacttacaacgttccagtaatatgttttgttgcctttgtgatcggcttgttcttcgccacgtgtcagcaggtcaccgttcttcgtgaatatcgagctaagggcattcagcgtttcggtaaatacgttataaatgcggctgttttcctggttcagcaactcatacagatcttcatagaactcgatcatctgatcgttgcgttccacgtcggcgtgcagccagtactcatgaatttttgcttcaatataagcattctttttcttctctttggagacaaaagcactcttcgcatcgcccagtttctcttcggactgctcctgagctgcttcaatatcacgaggaatgcggaaggcattctcacgcagcgtttcgatgtacgactgaatcatcttcagtacacagaaacctttttccgtataaatcagacgagagacatagaacggaccttgttcgggatgcaaaaacatacgccggatctgttcggtgaactggccagcaatctcaccaggcagctgtttcttcgccttgatatattcttcacgagcacgagccaggaagttctgctccagttcggtgtccatattcacaacctgtgatttcaccacgttgccataggataaacgctcgctgttctgataaccaggtagcggctcaggcacgcgggcttcaaaggacttgaccacactttcgagatcaatgcccagcttgcgggcaaacttctcggtatcctcctggttcggcgctttggagaacatggtgttcattttatcgaacatgcgatacgccagatacgtggtcatctcttcgatcggcagtacagccgaagatgcaccgatgatgttgtaatcatagttagccgggtacaccttgttcatctgtgcaatgttggtgcgaatgttgctgatatagtcatggatcgcaaactcctcaccagactgcttctcctcacttgccatgaagttggtaatgttctcggccgtgacgttcatgcagtaatcgtaggcgttctctagcagtttgccttcggtgttcgtcgcagagatcagatgacacaggttaaatggcggcagtggtgagttaacggttaaaatattgccgtacttctgtgtaaatcgctcaccgcggctatccacgttcatccaataatccagctctttgagcgcagcatatccattcttgcgaatgtattcgcgagtgtgttcgcttaagcttttgttggacaggttcacgtctggcgtgaacaggtatccaagcgtattgacgcggtcaatcccggcagagccgtgatcccgttcgataatgccgcgcacgatataggaaatatcgaggaaacagccgctgcctgtaccgccggacagacctgtcagcaggaacaccatcagttttttgttggtgcctacggataaggttttgatctttttatcgatggcctgtacgacctgattaatcttggtgaacaggagcagacgtccagcctgacgtacacctgcggcgccgttcataccgtccgtgatgctcagttcaggagacagccagtccgtaatgtacggctccagcacgctgcggttctgtagaagtccgccaatctcggcattggacagcaatacgaattcattaatcggatcaagtccgatccctttatactttttggcacgatcctgttcgtttgtctcaaaagccagaaactccacattgtccggcttgtccatttttttcttggatactgggtcttgtggcagcttgaaacgacggttgatctgatatttgagacgcagcagtgcgtcaattcccgttcctcccagaccaataatcaaaatggggttatcaattgtatcaactctgatcttctcactgacaatacctccgccaagtgatacatccagttgctgaatatgttctctaacaatcggtttcattccatgtcctccctttagttagaccagttgggcacaaactcattacacttgccactccgatgacagagtaaccttccgatcgctgttatacccagattttttgattctattttccaaaggtgaacatctgggtatagcgtatgcttccgatgcagctttctttcagaaagcttttaggcgaacgcttcgcttcttcaggttttctctgtcctctccgttctcgtgtaaacaattatatccaacttaaatttgcattcctttttaaccaaacaatcaacttacaccagatactcaattaaaatggtcttgtccgcctgttgcagcgggatgctcagtcggtcaccgttcttcagttcaacgcctgagcttgcatcgactgcacgaccggatttctccaacgtaccgcctgcggtgttacggattataattcgatccccattgctgggcgtaaatacgtatttttcggtttccttcagctcagggtccagttgcaacaactgatgcagatgaaatctaccgcggaaggataccagctttttatattgtggatatgacttgtctcccgtgttctcatcacgaatctccacaaccatctgacctacaaatccctggtttttgcgtttcagccagcccatcaagaaccaggcaccaacaccgaccacaatcagagctataacacccaggatgacaggtaaccaaggaaacggcttgtcctgttcaccgcctgacgttgttggttgagatccacttccggctgatccactcgcgttgatcgtgattggctcactttcacggtagaagctgtcttcttccgcacggatgactaattcatagttatgattgtctggtacttcaaacgttccggcaaaaccagaacctgtgttttccagcggttgttcctcgcttttacctgtatctacatctttcacaaccagcgtcgccttcatatccttatacaggtcattatcctgaagcggctgacctccattctccagtttggctgcaagatcaaccttatcccctttggtataggacttggtcttaattgggtccacaacgagctgaagatcatagttgaacaacaggttgatatcgatgctgtctttcggagccccttttacccgaagtttccagtctccttcttggggtttcaacagcttcacgagtgaataactcttcgacgtcgagagcttggctgcgtccgatttcaggtctacagcttgtccagaagggtccgtcaattgcacttccaccggcttcgaagacatgatcgaaatgtttgcttccaatacactgtcattcggtacattcacggtaacttcctgataactgccgtttcccgttacagagggcaacttcaccacattcagtttggcatgatcggcgaagatctcactcagaatctgtggcagatcgtccggcgtatcggtaatgaatgacttgcctccggtctgctgagccaggtctgcgagtgcattcttgttcagcttgccatcggcattcaatccaatcgtatacaccggaataccctgatcctgtgcttccttcacggctttcgccagatcagcgtcggattgtgcctgtgtacggcctttggttttgttaaagtcattgttgccatccgccagcagcacgatcatcggcgagtgggatgggtctgcaccatgattcagtatgtttacggcttcagcgacaccaactgagacatcggtatatgggcctcggccgagttgatcaataaaatccttcaggctactcttgtccgcatcggactgaatctccagcatagccttttcccgctccacctgatcggtatatgcaacaattcctaccttgtccccctggaccggcagcatatcaataaacattttcatggcttcattactgatcttgtcacgatcacttgtattcatcgaattacttacatcggctacaagtaccgcatcgattccgctagtctgtgcctgagccgctgcagcttgtggcagcaacgcttgaggtaacagtagcgttagaattgccagtagaaccatcgttccactaagccagcgtattttgcgtgtccgcagcattgggtgtactccttcacgtttgagattaaaatgggaatagtttattataggcgtcaagccttaaggaaatcttaacagtctgctaataaattctgaaaagcacccctatcttgagttacagttttgtaatgactgacaaaaatcgacgatttcatgccttgaactggcacaaaagtaccaactatggaaatatgatatagttattgccagcaaactgcaatataacagcgcttgttcaccaagccatagaagggaacggattatggttacatacggatgcctcgccatattgtttctttttgtcattataaagggttttgcactccagcttcatcgacggaaaccggtctcccgggaagacacggatcgtaccctctacactattctgaatggtgagcgtgattaagcatgagtactaaactagttgtatccataagaccatttcatcgaacgacctatgcctatgaaaagttgcaagtctgctcacgttgtggacagtacacctgcctgtgggaagaggagtgcacggcctgtggccggggtaccctgaactccgttcagtcgaaggcgacttcccgtgtgaaacgccgcattgcacgcgacctgttcattaccatattgttcggtgctgctgccacctattttggtgaaaccatagatcagaccatggcggcagccagcgtttccctgctgcttctggccttactcatcttcatgcagaaacgttcgttcgaggtagagcagcagcgcgagttgaagcgcacgttgcaacaggatgaggaactcatccgccagggtattaaccgcaactgggctctggtcgccgaagctcgaaaacaagatgaagcacttgcctatgagatgctccgcgagatcggctcactcgtctacaatgaccggattcgactgcagcaggttgcgctgttacaatcctttgtcctgcgcagtgatatggatctgcagctcaagcccttgctactacgcagtttcgagcggctgctcgctgaatatatcggtgagatcgcgcgacttaagccggatcttatccgtgaagatgcgattcgttatatcgctacctatgaggtgaacattttacagctgcacaatggaattcagatacttacagccgtagctgctgctgccgtgcgcaagagcaaatatattgagttattccctagtcttattacccgctatgcccgctttatgcccaaggatcgattcatgagactttatcacacgattgaacgctatccgagcaaggcacgagggggattggcagagtcggtaggtcgggtgtataacgagaaatatcgggatcaatacgcagatgttcagctgtagggatgatatattgagaaagaaaaacgtagtttagtgcaaactcactccctgtatatagacgaatgcaattttgtccacccctgcatgcgcgtcagcaccacagatcgaaggttatgcttctaatgatataagaattaatccaaaaacaccccatccttaggtctaggatgaggtgttttgaattttatggcagtctgccacgtgttatacgcagtacacgaaaaaaagaaaaactagatggtgaatacctaaatggcatcttccatggatcaagcaggcgcgccaacagacactcgcagatgacaaaaagaataagcggaattgatcatctgtactggtgaaaaaagggccgcgacgtggttccgtcgcgacccttgatctgaaggttcggtacatctgtacccgaaccctctcatatgtgccatgcccatcactgtggcatggcatggtgcctgcgcaattgcggctgcatcgccgcttgcgccaaggctttaccgtccgcgacgagaatcgcgacggtcgcccttcgccggtccgcgtcctgcggattccggacggcgagagccttcgctgctgcgcccggaggtgcgcttgtcggcactacggccagcccagccgctactagctgcgcggccgctttgacccgttgctccgcgactgctgtcgctgctacgcgcggaaccacgacctgcgctgcgctcgtcgccactgcgacccgcaccgcgtccaccttgacccgctgcaccacgactgctgtcgctgctgcggccaccgctacgaccaccactgcgtccgccttcactgcgtccaccttcgccgccgcgggaaccacgccccccacgtccgccatctctgcgatcgttacggcctgcaccgcgtcgagcactaccagttccggaagagcgtccgcctgaacgttcgtcatccccttgactgttgatggaacgtctagctgctccagttgaagcaattggaccttcgcttgtccactggatacgggacagcttctggtcaataccttgttcaatgcgtgcaagttccggtctgtcgtgctctgttgcaaacgttacagcaagacctgtaccgcctgcacggcccgtacgaccaatccggtggatataactttccgcatcatgcggcatatcgtagttaaatacatgcgtaacgccttctacatcaagtccacgtgcagctacatctgtagcaacgagcacttgcagtttggcatcgcggaacgctttcattacgttctcacgcttggattgggacagatctccatgaagttcatcacttgcataacctgcttcacgcagatcttggttcagcttggatgcacgacgcttggtccggcagaaaataatcgccaagtatgggcgatacgtatcaatcatgccgcgaagcgcttcaagcttgccgcgatccgtgcattccagcacttgctggcgaatttgtttgatcgggataacagattgggaagacacttttacatcttccggatctttcatgtaggtcttcgccaggttgcgaatgcccttaggcatcgttgctgagaacagcattgtctgacgtttatgtggcagctcgctaagaatcgtctccacatcgtccaggaagcccatgtgcagcatttggtcggcttcatccagtaccagttttttcacattatccagcttcaacgtgccacggcgcaggtgatccagcagacgacccggtgtaccaataacgatctgggtaccgttctgcaatttacgcagttgcttgtccacatcctgcccgccgtatacggcaagcacgtgcagtttatcgtcgttagcagtaagcttcttcgcttcttccgtaatttgcagcgcaagctcacgcgtaggcgcgataatcagcgcttgtggcgaacggtcggatacgttaattttctgaataatcggcagcaaaaatgccagcgttttccctgtgcctgtctgtgcctcagcgataatatcgcgtccacccagcagtaccggaatcgaacgctcctgtaccggagtcggcacggcgatgccctgatgtttcaggatctcgcaccattccgggcgaatgcccagttgttcaaagtttgccaatcgttacacctctgtatattcatttagataagtccatttcataatgacttctgtatcagtatctgccatcaagactagttttccttatatcaatcatgattatgaaatgaattttttaaaaagcaatccactcgttgctcttcttctccataccctgtagtttacacgttagtcaagcaaaacaaaaggggatacagcgttacacccccaacttgtagcagaaaattccaagatcagcgtaacttgtatcgaccaagtgagtttggggatggttttgagagagagtgtgaggttggttttgagagtaactataggagcccctctgagaatgatgatgagtggagtaagctaaagcgctagcccgaagtatgaccctgactctgtagaatggggttgaggattgaactgcacatggtcaggcggaggttatagcgggctacagtgtctgatggcactccttgagaaagatgtattggatcgttatgttcataatccttggatagtttagagatatcgttaagattgagatagctgctatgattctataaattgttgtgaagttcatcctaaacagatcaaaaggaagcgatcttgcgaaagtatcaggaattgaaaggtaccttacataactccgtacattgagatcaagattcaagatttctcgcggttcgaaaatagctcttacgatgaaacctcctatgtaccactaatcctaacgaatccaggacaccctattacgacaattaaagccgtttggattttctaacgaactccagtcaccttattactcgaaaatacctgcgaaacggcatcagtatatgtggaatcagcaaaataagatgtctgagattcgttaaaataacgaaaacatgaaatacccccatataagacgtgccaggttcgttagagtttacacacactgaaggaacaagcttgagcacaataacatcggctacagtaataacaacatttactaggaccagaacaccaactacaaatactagaactaacaacaacaaccagcactacctatacttctactagaactaatactacaactgctactccaactaccacttctactagaactaccactaccaccaatagaactactactacttcttcttcgttctttttcttttctcttcttcactgtacacaccacacactctaataaaaaaaacaacgacgccctctccccaacttacattgggaaaaagtgcgccgctgataaaaagtatctttttatgttatctactacatagggatgtcacatgtctgctcaacactactttaggacagttgccttcataactttattacttgtttagatccttaattccagatttactaaactgttcatttttcaccttgtccgcgtaactatagtcagacattgcacctttggacaacaaccttcgttgcaaccaagttacgaaccgtgcccgcctgctgtcgcaaatccactccgttcaagaatacgagagctttcctcgtttaacccgcgcaggtgcacggttttgcctagcttcgcgtatttgaacttcaatttgccgatagccacaaccgcagtgttatcccagatatgtgaacctccgaaatcaatcgtgatttccttcggatcggcctctgcatcgaactcatctacaaagcgggacgaagagccaaagaagaatggtccgtgaacccgatatactttctgcccttgttcctggctcgcctgtacgcgaatcttggtctgtttccagccaaaatgcagcacactgagcacaacgccgaccataaccccgatcgacagatcgtgggtatagaccacaattgccaccgtcacgatcatgacaaaggcttccgcgcgcggcacgcgagttatatttttgatagaactccagtcgaatgttccgatacacaccataaacatcacaccaacgagcgcacccatcggtacctgtttcaccacaccgctaaacagcagcaacagaatcgcgagaaacgcacccgcagtaaacgtggataatcttccacgtccaccagatttcacattaatgaccgactgcccaatcatcgcacagccgcccatgccgccaaacaaaccgttaacaaaattcgcaataccctgaccacgcacttcacgattcttgctgctcttggtctcggtcatctcatccacgatggttgcagtcagcagggattccagcaaaccaaccagtgccatggtgaatgaataaggcaacagaataatcagcgtgtcccaagtccacgcaatatttggcaagtggaacatcggcagagtgctcgttatatttcccatattgcctaccgttcttacgtccagatggaacaccacggtaataatcgtcatcacgacgattgcaatcagtggagctggaatgcctttgaaaaaccgtggcaaaatataaacgatcgccagcgtgcccgctaccatcgcatacataatccagttcgctcccgtgaagtgggttaactgcgccataaagatgagtatagccagtgcgttaacgaatccggtcagtaccgaatgaggcacaaacgtaataaaccgtccaaccttaaatatgcccagtagaaactggataatgcccgtcaaaatcgtcgccgcaaaaagatattccacgccataatccttgacgagtccaaccatcagtaccgccatggcaccggttgccgccgagatcatgcctggtcttccaccagcaatcgagatcacaatcgcaatcgtaatcgaagcgtataatccgaccatcggatcaacacccgcaatgatggagaacgcaatggcttccggaattaacgccagcgctaccgtaatgcctgccagcacgtctccgcgaatgttgccaaaccattgttgttttaaagtattcatatgttcttgccgttcctcctacgtgtattccttataatggacaatcccgctgaacagtaacggaagccgttcacactaaccatctacccaggacagcacaaaacaacggattcctctccgcgtcattcacctatgctcatccctgagttgcatcattatttaccatccatattgctttgaagggttaatatgcactcatgtcttttccgttccagtgtgtaccgctggtgttccattactgcctcagttgtcttactcgtgcgacatcaggagctgatcctgatgccaataggttttcccctctcagaaaaaccgggtccgttaatgtactgacctattattatagtcacaggaccggatatgtactaatacagttaagacgaaaaaacagaaccttttcttctattatcttaatctttctataatttactcaccaattctctattcacaaaaaataacccgcaaagatcctttgaagaaagtctctttacgggtattcttgtgatgtaatgccgttgctagaaccttcccgatttgaatatcgaatagagcaggaaagccaccattagaatcgccaccaggaaaccaatctcaatgaccggaatatcccacagcatcgtggactgatgactgatcgacgaaccgataattaagcccaccataatgatacaaaaggcaagtaacacgatactgaaggacagccgattactgatctggtccattctacgcatgagtgcgtccagttcagggacactaatctccagcctcagcttgcctttgctaataatggatgataattgccttaactgccctggcagaccaatgacactctcggccatatcggcggcactgcggaacaaccgattcttgattcttcctgcgctaaaacgttccttgatcagcttccggccaaagggttcagccatatctacaatgctcagggaaggatcaagatgttcgattacaccttccatcgttagtaaagacttacctagcagcagaatatcagcaggcatgacaacccggtgcctctgagctacgccgaacaagtcattcaacgcctgacccacactaatcttggaaaagggagtatcgtaatatttggtacgtaacttgtccaaatccacatgaagaccacgcaggtccatgtcatctggcatcatgcccaatttttcaatcgcccggatcatactgtccgtatctttgcgcattaacccaataataagtgaagcgagctgttgtttcatctcgtcgctcagactgcccaccataccgaagtctataaaagcaagacgtccatccttcaataccatcagattgcccggatgtgggtcagcgtgaaagaaaccctgaataaaaatctgatttaataatgaatccaccagccgctcggcaatgttgttcagatcatggccgcgtctgaccaattcttcacgatcattgagtttgataccttcgatatactccatagtgagcacacgggacgaagtctgatcccagtagattgtcgggattttcaccttgttgtcctgttggtactgctgtgcaatcttttccgtattgcggccttcgactgtataatccagctcggccatcaacgcctgagcgtattcttcgaccatttgcggaatctgatattgcttcacccagtcccagcgcttctcggccatggctgtcagttcacgcaagatatccaggtcacgctgcacaatacgcgatataccgggacgctgaatcttgatggctaccgattcaccgctttgaagtttgcccagatgcacctgtccaatgctggccgcagctacaggggtatcctcgaaccgggaaaagatctcctccagcggtgtatccaattcctgttccaaaataccccgtgccgtctcggaagagaacggcgggacctgatcctgtaacttcaccagctcacgaatgacagactcaggcaacagatctgcccttgtgcttgcgagttgccccagcttaacgaaagctggccccagctcctgcagcacaagcctgatacgttcactcagcgttttggtggtgtgtgcttcacgcgacatccaccgtctgggcagagccagcagctggaacaaacccagctcctcgaccatataaccgaagccatgacgcactagcgccatggcaatttcacggtatctgccgacatgtttgattcgcactgccatctactcgatctcgtttcctttgagaggaggaggaacttcaagtggagctggggattcatcaggttgaagctgtggtgagtggcccagttcggcaagttttttctccagaacggcaacgcgctgttccagactggttacatcactttcggatgccacaccagcttcctgaagcacacgcttgacctgttcttgaatcactctcttgaactggccttgttcttcatcgccccgttccagcagacgttcaaccaaagctttggattcaccgggcgcaagttccccgcgcttgaccaaatcatccacggttttctcaattttttctttgcttacgacagtaagaccaagccctaacgagatcgcctttttgaacaaatcgctcatttttgtcatcctcctcttcgttgatctctatattataccccttatactctgcatgcaaaaatgtcagtccgatcagacgtaacgcgcagcccatttgcctgcctgcagaagtaacttgcggtacgtttcgtgtgcaaaagatggcacatggtgacccggcatcagataaacaatacgcccaacaccatatcgatgagcccaaaccgcaggctttggtccttcttcggattgatattcaagcaatattttcgtttcggcaaaagaaccaaattcgaactgataaggctcttcttccattgtgaaattcgaaataccctccgtcacgggatggctttccgccgttacagtgaattcaagcggtgcatacgccggatgatgcaggaacttggcaccgatcatctgtttgagctcataacgattttggagcgaaatgccgttatgtataatgaccagtccacccccattacttacataggacaacaaacctgctgtctgctgtggagagactttacccttccaatcgtccatgtatgagatacatacatcaaacccggttatattttcttgcagcagcatattccgattctcactgcactgcacagtcatagtatcatggaaaattcggctaatctccgcatccaccccctgaagcgggtgccaatccggatgtgtataatcgccaagtaataatgcttttttacgatgatccattcaattaatctcctttcttgttcacctcactgtataaaaccaactaccaggggagcttctctcccttgtagtccacatatgcgggctgatctcctttaaactgttcatggcggtcgataagtactgcgatatgctgtgcagattgctcgggcgtgagatccgcagcaacatccaattcgcccctcatataactctgtacccaaccgggatgcacaagcatcacttgtccgccttcatccttcagaccattgtgcacaagacgggcctgcatgttcaaagcagctttggacatacaataggcataccacccatcccgactgcattgttctatacttccagcctcggaagagatatcaacaatcagcttgacctgtccttgaagaaggaggggtaacagggaatgagtcacacgcagtgtacctaaggtgttcacattaaatacttcagccatctccgccatattcaacggcccgcggatatgatccgtaatacttcctagtatagccgcattattgatcagcatatccaaatgattcgtatccagctttaatgtctccgtgaacagagctaccgacaggtcgtccgcgatatccagttcgatggcgcgcagatggtcaggatatccttctgcaagcatacgaattccctcggaatcttccacgtccagaccggccgcatacacgagataccctctcttcagcatctgtgccgtcaaagccaatcccaatccacgagcagctcccgttacacatacggttctcatcatgatgtccctccctcgcataatgattctgtcttttattcattccacatattcatctgaaaacctttaattcagaataggatcgccaacttcacgaccaaagactcaggaggtaaaagaaagattagagccattttgcttattgaattcagctatctatttgagctataaatagctgctattatccctgcatatatcgctcctgccgataggctaaacaatgttccacccatcttcgagcagctgccggataagagcccagatgaacgtgcgtataccccgccacgatgttgcctgcggcatatccctcttgcttcaagccacgcatccccttggtctcatacgcataaggaatcgtttcttcatcacgataggtcattgtcgaataatgaaattcatgacctcgaagtacttcaccctttttcagtaaaaaggaatcctgaacgctactcgcttcacggtagccaagcacagcgcgcttcttctgcatctgcacctgtgcggggataatgcccgccatgtcgaaagtaactccctctcggtcggtcaacgtttctccaagcaccatgtaaccaccacactcggcaaataaaggcatgttggattgtactgcctgtcgaagtccttccaagaacccttggttaccggcaatctctgctgcaaattcctctggaaacccgccgcccaaatagacgctatccacatccgttggaataccttcgccagcaagaggactgaagtattgtaatcgggccccggctgcttcgagcaattccagattatcgggataatagaaattaaatgcggcatcgcgcgcaacggcaatgacaggctgcatcacatatgatacatgtcgattattaacgtggatcactggattgtaatgtgggtcgtaattcgagcctaattcagcattagccgaatcagcgtgggcagtagccgcaagactcacttcttctgcattcaaaggcggggcgcttgtcgccagttccagcagaagatccagatcggtgcccttcatcaacacatcggcagcccgctgaaataagggttccagttcaccgcgctcaatggcaggcaccagccccagatgtctctcggggatggacatgtcttcatcccgcttcagccagccaaccacaggaatgccgcacatctgctcaatggctttttgcacaatggtataatgacccgcacttccacaacggttgacgatcactccggcaatatgtaattcaggctccagctgttgaaaacccagtacaatcgcggccgcactgcgagccatgctgcgtacgtccacaaccaggatcacaggagtctgggtcactagagcaatctctgcagttgagcctgtattgctgagcggatctttgccatcgtagaggcccataacgccttctataatagaaatatcatgccccgccgatgccttctcgaacgtatctctcacgtattcaggcgatgtcatccatgcatccagattacgtgacggtctgcccgtgacggcggtatgatatgtcggatcaatatagtccgggccgcatttgaacccttgtacactcaagccacgctgggcaagtgccctcatcagccccaaggttactgtcgtttttcctgcaccacttccggtccctgcaatgataagtcggggtctggcattacgatctgaaatggtcatcgtcatttccaccttttcgtcaatataacaaaagcctctgatcgaagcactatcaaggatgtacattcgtgtttttagttgtaacgtataaattctataatctaaacaaaaccgcatcatatagcgatgcggttaagattaatgcacactttttattcatgaagcgacgccaaaagctttttgtcgaactgatctaaaagcaggccactaatctctaatcttggccgcacgccctgctgcaaagtaacgcccaagctcaacgatgagtgctcccatcttctcttcctccggaatgaccagtgcctcaatgccttcttcacgcatagagtttgctgtaactttacctacagacgcaggaattacaccttgtctgaaggctgcaagcaacggctcaagcttgtcctgggaagccgcatattgcgtcagaaatctaacctgcggtccacttgtgaacgcaacagcatctacctcgaaatttagaatttcattcaataactgttccagttctgcctcttctggcggtacatggcggtaaggaagcacttgtctgacgatggcaccttgttcttccaaccatgcaacgagtttgggagctgtctccccatgaagctgcaacataacctttttccctgcgagatcatgtggggtgaattctcggatgagcccgtccgtgctaccgtcatcatctcgtaccagcggtgttagcttgcgctttttgagcgcattcaccgtcttgtatccccttgccgcaattgaggattctgataatacatccaacaattggcctgccacttccatatcctcagccatttcaaacaatgcatccaatcccatacccgtcgttaataccgcccattctggcgggtctgagatccaggataccagcccatccctgatactccgatcatccaggaatacggtcccctgtgccggtcgcacaagcgggattccacccattttttcaaccagtatggacatttctttcgattttcgtggtcctgtcaatgctacacgcacacctgccaaatgttgagccattcatgttccccccgttagttcagccgaatgttcatcagtctgactacagtatacagggtacttctgtgaagggaaactgtgctttccctctttttgcccgttcatctataaggatttttgatggaatgcattaggaaggctggagttctccgccatgagaatctttccgtcttttctctccgtccttctccgaatctgccgatttttgttccggctcatgtttctctttcttggactggtctcccgatctctgttgggtagattcttttttatcctttttgcgaggacgaaggaaaagaaacagcacaatagggaacatcacttcaaaaacaatggcaatccatgtccattcccgagtaaagcgattgagctgaatggcatttcggaagaaccagaatgcacagacaaatccgacgagggcaatcgggcctgtcaatacctttcccgatacgttcggaatcattcgcttcaatccccagcagacaaagtacaggtcaaaagcaatcttcgtgatcatcgtaggcaaagtcgctgctgccagtgccaagtcaaaccggtccagaaagtcactaatttgcagctgtcttgcaagctcgtaggaagggtataccagtcttgaagcaatcggaacgccaatagaagtgatggtttccacaacaatcagcatcatgagcagtgccgagaggataattccccccagggcagacttaaaacgaaaatcactacccttgattacaaagggcaatgcaatcatctcgccataaaatgaaaatatgtaccaactccctttacctacgcctgcaacatcgacatgaaaatacggcatcaggttgtccatgtcgacttgttgaatgagcatgaaaggtacaattaccgagttcaacaggaacaaagtgacgtacaattccgtcattccaatcaaggagcccagtccgccccgaacgataaaaacgcccataatcatcagtgacattacaatgatagagatcggtgttgtctccagcaatgtgatactgatatagtcacctgttaaccgaatatctcttgcaaacacaaagaaaaaaaacataatgtacagaaacgccattaatcttcccagtaaggggaatcttccgatgagcgactcgaacagatccttctcaggaaatcgccgctgaacccggctcaacatccacatggatgcaagcatcactacgactacaggtatatacgagagataagcatgttgttccgcatagtagatagcttgcgcgtgtggctgaattaacgtacctgaaacactgagcagcagcacgagcaggatcatctgacggtgtgtcactctctgattcatgaaaaacctcctctccctctcgtgatcccgcaaacttaatgcgtcctgtccataaacctagggcagtggcagtaaacgctggataacgtggcttatccataccgacacaaataaggttttgcttagattagtgacatagaaccaaatgcctgtacctactgctatcaaactataggatagccagcgattaatggcagctgcctgtttcaaatgtctgaaatccatcaagatgaccacgattgccatggccaggtaggtaaataagagtggtttaatcatgtacaacttcctcctctacaacgccgattggtttattactcaccccaacgttttcaataaggacatggggggtaaccgtcacctcaacttcagggtatatgtcatcccaacgatccttcatcgtgtcccacttggccggcagatgttgatgaatggatcgaccaattccaaggatgtccgcatggtattttccctgaaccaaccggacaccttcctcgatatccaattttattttctcgtgaatggcttcatgtaacttcagaatctcattctcacgccggtcaccataattggattcgttatctacgagaactcccttggcatataattcaatattcacggtgaccttgtcagccttgatactgggatgtagtgaagcgttgttctcgttcaacttgatgaacatatttccatctccgccaggagctttaaccataatctccggcgcattggcctcgcccatagcaagaatgagcgcatcggctggagctttgtcgatcatgccaaccagcttatctttcttgaaaatggccaacccatccagcttgatgtttgttttggcgtccttccacccttttggaacattgctcactttcgaagcgaccggcaggaatggatcgacaccttcactcagaatggcatctataaacgttttaagtgaacgtggattacgcatattgaggaagcacagttcccgcaccatctcggatggaaacttctctataggtgcatccgtatccatgacctcatatgctgcaccttttgtgaccactggcaatgcagagaatcggttcagcggataccgcgtaaacagatcaagcatggaggccacgccatcccgggcaagctcctcaccaataagcatcgtacggcgatgcgcataatagattgttcgtgagagttccttttgaccttcaatagacgtaccatgcaatgatttggctgtattggataacatgaaccaggatttatccccactcgtgccgcctccgcctccctcactaccggaagaaccggattgtcccggcagagcaatctgaagactggatctgtaattgtccccctccttatcaacagcaataccaatcacaaaggcaacatcgttaatctccttacgatcccagcaacctgaaataaaagtggtacataacaacattgctatcactgcccggtacttatatatgaactgcatgggttcaccacccttcctcagcttcaggggaaccgttgatcttttcggtcatccgtttctgatcccgatgtaccgtagaaggacgattaatcattttccaccatggcacacgaatgagaatgtctttggtatctgttttactgtacgggctaagaccagagagatatgggacaccgaacgaagtcatctgtgtcagatgcaccgagatcaggaccaagccgatgacgatgccgtataatccaagcatacctgccagtaacatgatcggaaatcggagcagacgcaccgtaatcgcgaagttaaatcgcgggatcgtgaaggaagctattcctgtcatggatacgataataaccatcggtgcggatacaatccccgcttgaactgcggcctgtccgatcacgagtgcaccgaggatactgacagcctgacccactgtcttgggtaacctgacccccgcttcccggagagcttcgaacgatagctccatgatgagagcttcgaccagtgccggaaaaggaatagcttcccgtgcccccgcgatactcagtatcaatgtggttggcagcatgtcctgatgaaatgtcgtaatagcgatgtatagggctggcagaaataacgcaatggctacgaacaaaaagcgaatccagcgcaacagattactgatgaagaatcgctcgtaataatcctcgctggcttgcagcatctgccacatcgtgactggagcaatcagcgcaaagggggttccatctaccataatggaaaagcgtccctccaacagattgcctgcaacggtatccggccgctccgagtagtgcatctgaggaaaaggcgagtacggatgatcttcaatcaattcctcgatataacccgtctccaggatgccatcaatattgattttttccagacgtttcttgacatcttgaatcgtttttggatcagcaataccttccaggtaggtcagcacaatatctgtcttggtgtctgtacctagggtcatactcaccatcttgagagcaggtgttttcagcttgaaccgcaataaggccgtattcacacggagcgtttcggtaaatccctcccgcggtccccgaatcacggattctgtctgcggttcctccacaccacgtctgacgccacctttgacattgaacatccaggctttgttacttccatcgaccaccagaagggcagaggatgccagcaccccttctgtcgcagcagcccaggtatccactcgcttcacctgtgttagctcaacggttgtatcatccagtggaacatcaggttcatctgttcgctgctgcaccagccctcgaataatcggtcgcagcatgtgttcctggatatcagccgaattaacaataccttcaatatagacgagaagtcctttcacttcaggcgtaatcatgacgttgcgaaaaaccacatcagaacaatcggagaagatttcctttaccgccttaatctgagtttcatgtactgcactaatcggctgcctaagaaaaggcggggacggcagtcccaaaggaatatgttttttttcttctgaagctcgtcccggttgtcgggacttgtctttcccagatgttttgtctgccatatgccgcccctccgttcttgtttttatacaaggtagcttgtgccagacagcagggaattatgtggtcttttttgcaaatttacgattaaattctctgagttttcagacagcaaaaaggcctctgtatttaacagagacctctgggatgttccaagttctataggtacttataagttaatccgcaaaataatcttcaggcacataacgaatctccgacttcgcatagatgcttagcgtgtgactctccctgtcgtatactacctgttcaccatctacgtagtaccaatgtttcaaaaggggctgatccttgcgttggacaaatcgaaatacgttcagttcctgtctaagctccataatctgttccacaatctgctcgtccagacccgtaacggtaaatatgaaacctgtaccttcttgttggaaccgataggacagcgaatctgttttgctattagctaatcctcgtccggtcaccgcatgtttaaccataaaccattcctgttgcgccatacgtgtatatcctccttcatcttggagttcatttcatcagccatctacggcaaatcaataatcatatagaacgtatcttcgtttccttgcagttcgattgaatcccgctgttccacacgagccgtgtcgccttcgttcaacaggtactctccatccaatcccagcttgccttcgatggagaaaatgtacattcggcggcctgcatcctgattaaaggttaacgtttcgtctttggctaatcggccaaggtagatcgtcatatcctgatgaatggtcgcaactcttggtcccccatctggggatacaatcggcacgagtgctcctgccaatgccgctggatcaaatgatgtcgtctcataggagggctccaacccttttgtctgtggcatgaaccagagctgaagcaaacgtacttcttcggtatcggatgcattatgttcggtatgaatcatgccactgcctgctgacatccgctggataccaccaaagcctgtaacggctacattgcccagattatcttcatgtcgtaacttgccgttcagtacgatcgatacaatctccatatcactatgcgggtgagccccaaaaccgcgaccaggcgcgatcacatcgtcgttcgctacccgcatcggtccaaacgccgtattctccgggtcttggtattctccgaaagaaaagctgtgactaccacggagccagcctcgatcgaagctggagcgggcatcagatggaatgacgttaatcataaaatgcatcctccttattttttcttagtagcatacttattctcattgtaacaaacctcaggcatgtcgtccaaacgaaaaaagttctctactgatcagcccggttcgcaaatcaattcccgaaccggcctggccaataaagaacctcgttacaggactcatcctgcacttcattattttttagcgatcgttagtcaattcaagcactcacattctggcgagcgttcccctgtctggagaacagataatccacggccaggaggcggcttcctgtgaatagcagtgtcagggaacccgccagcagcaggtaatctaactcggtaccactcaggaacggctcacccactttggctgtaaacagaacgccaaccatcacgatggcaaacagggcagcaaacacacgtgttcccagacccagaatcatcgctgcaccacctaccaactcaatgatggctacaacggatgcaagaaatccgggaataccaatgctttcgaaaaaacctaccgtaccgctgattccaccttcgaatttactccagccgtgcaatacaaagatcaaaccgatcataatccttgagaaaagtaatccaatctctacacttttattattcatgttcatcttccttcctcattatattcgacttcacatgtagcccaattaatctatccgatggaccaaacaaacaagatagacagcaatagaaaaacagtagccgacatcagaacagcataacgtggcaacctcagcgtcacgtcctgttccgggtccagcagacgtgaaattcggacattcaccgacgtatccgcaaatgaggattgaacggtcagttctttcgccccccaaggttcaggacaagcacggagcaacttgagcaaagcactgccaatgcctgccacattgcctgtacgctcaatggcctcattgtctgccagaatttctctcacaatattgtaatgtttcgaagtatgcttcaatacgggaatgtacggcatcatgattgcaaataccgataacagtgttgtcttcagtgggtcacggtgccacagatgatggacttcgtggtacacaactgcagtctcctcttctgcatccagcatcgtcagaagtcccgtggagagtacgatgcaaggtctccataaaccaattgtaaatgcaaccggagaatgcttgtccaccacaatgaatcccggctgtccgagatggtgatacttggactccagttcgcgagacaatgcacgcacctccatggagcgaagcttacgtacggctgctctggttttcatcatacgcaccattaacaaccaacctgttcccgcaaatgtcagcaataccagtgccagcaggaaatgtcccacggataaccatcccagtcgactcatccaatgattgcagagccagagcaggttaaacgggatatcccagccaaaaattttgtacatcgcgtacatgaacatctgtatgaacacgagtaacggaatgccaaacccgacggtaaacaaaagtttcgagcgggtcttccacatcttaatcgctatcctttttccattgtttgatcttctgttccaagcgttcaatcagacccgcatctgcttcgtccagcgcatccagcatatgattcaatgccaaagctccgaattcatccaccaactcatgtgacagttccttggattggtcgttcataaactcctccttgctctgtaccggttggtacaaagatgttctgcccttttgtgactttccgagaagtcccttgtctacgagccggttcatcacggtcatgactgtattaaaattgacgtctttgtcttgttcaagtgcggtctgcacttcacggatgctactgccaggatgagcccataaaatgtccataatcttggcttccagcggaccgaaaaatcggttgagcccacgctcacccactttgaaattgtgtattctcattttctgacacccctcacactacccattgtagtgccatcaaatgagaagtcaacctctatgtcagctattttatgtaaatgatttgtaaatttgttttccatttcagtaaaaaaggccaaagaccgggagttccgcacgttcgcggctctgcccggtcttcaacgaatattagtccgtatgatgttgtagaacatggtcaaactgtactttattttccatcctgtgacggcatatgtgcagaaatatccacgccgagtccatgagccaaacgtccgccaagctgtccatccgctcggaagaagtggcacagggcacgcatttgaatatcaacagatacgcccttaaggtcattgatcagattatcaagcaaatgttgttgctctacaggagtaaatgaacggaaaagctcccctgactgcgtataatcatccgtcttctcgattttctctcttgtaacatgcccttgcaacggaacctgactgtcccggtatgccggatcttcttgcgggctgtttcctgaactgttgggttcatagttcaccggagatgggtcctgattcacattcatgagtccatcacgctgatgattacgaacgggtgcgtacgggcaattcaccggaatttgcaaatagttcggtccaagccggtgacgctgtgtatctggataggagaataggcgtccttgcaacaatttgtcttcggaaggctcaattccgggtacaagcgcactaggagaaaaggccgcctgctccacttcagcaaagaagttttgtggattccgattcagggtcatggtccctaccgtatggaacggcaatacatcttcaggccatgttttggttggatcgagaggatcaaaagaaaaatcatccatttgctccggcttcaagagctgtacctgaagcttccactgcgggtattgcccgttcttgatatgttcatgcaggtcccgggtagcatgattaaagtcctgtccttgtacctcggcagcttcctgacgagagaagcctcgcacgccttgtgcagactcccatttgtatttcacatagtggacctgtccctgtgcattaatccatttgaaagcatgtacgctgaaaccatccatctcccgataacttgctggtgtgcccagatcagagaacaaccaggtcatcatatgtgttgattccggtgagagggtcataaagtcccaatatcgggcaggttcctgaatgtttgtatccggagccggcttcaaggaatgcaccatatcagggaacttcatcgcatcacgaatgaagaaaacgggcagatgattaccgacaatatcatagttgccttcccgtgtgtaaaatttgacggaaaatccacgtggatctcgtgcagtctctggtgatcccgtaccatgaataacggttgaaaaacgaaccagcacatccgtctccgtacctggatcttgtaggaagtcagctgttgtatactccttcatactttgctctagcgtgaatacgccatgagcacctgctcctcttgcatgaaccacccgttctggaatacgttcacggtcaaagtgggctattttctcaatgagatggtagtcttcaagcagtgtcggccctcttctgcctgctgtgcgggaattctggttgtcacctacaggtgctccctgatttgttgtcatacgttctgtcatcatgtcgtcctcctctaatgggtctcacggctgttatatatctactattaaaatcatattcggcttcggtttaaatatacatttagacttgatctaactgttaaattgattctaacatgtcccactctactcttgcatgaggttcacatgagattaagatgaggttcttcaacattcatgaatgaactatgaacatgttttaagggaatgattctgatctgcctctctattaggtagtacccgaaaaagcatgaagtgaaagataaaatttgggcaaaaaaaagcggactaatccgccaggcggtagcccactcctcttactgttacaatatattgcggcgaagacgcattatcgcccaattttttgcgcaagcttttgatatgaacatcgaccacattacttccacccgtaaagtccgtctcccagatatcgctgagcatttcctcacgggaaatgactgcacctttggcatcaatcagcttgagtaacagatcatattcggtcttggttagatgaatccggttattatcgcgctgtacactcatccgttcacgatcgagccacagatctttaaatccgatacggtgcccttcctcaggcaaaaaaccacggttgggcagagcagggctgttgccaatcatgcgctgcactcggtaaagtgcttcctgcgggcgtgcaggccacaccagcaattcctcctgaagcatcggtccacttgcactgccaatcatcttctcaccaaccagatacaaacaaggggttgtgtgctcagcctcacgattcaatcggctgctaatgccggcaaatgcatcgatagttccagccacagacagatcatagatcaacagatcaaagacaagacgctcatgcagatccggttcccagcgatggaaaaccagtacatcaaagcagctatccgttaaggcctttaccagttcatgaacctgccccggcatcgggctgatcagaataacacgccgtgtaaccggacaattgtccacaaggggtgttgagtcagacaaggctggtttaacccttaggggtaaacggcggccaggcagttttatttttacttgatccgtttgtttctgcattccccgcagacacctccaaagaccacatgagcatgatcgattgcatatccggtttcttcagctacctgtttcatccattgtggaggaacctctgtcatcacctcgtccactttgccgcacacttcacacataatatgctgatgatcatccatacgggcatcgtaccggcttgctgtctctccgagtttaagttcccgtatcaattctttgtccgtcagataacgaagagaattatacaccgtaccataggccagattatatccttgttccacgagtcgattcatgacatcagcagctgtcgggtgatcctctgaatggcgcaccacatcatataccgcttgccgttgtatcgtcagatttaaagttctcacaaccatttctcctttattattgatccattttatatgaaatcagacactgatcttctacttatgatggtcttcccaaaaagaaggaatatattttgatttagattaagtataaatctcattgcatattgaagtcaatatcactctaacatcctgtatatgcaaataaaccacctttaccagcaatcacctcataaatttgggataatatggttcgctacagcaccacttttcagataaaatatagggatgtgcgtaaaaagggggaatgtcggttgtttagcacttttttcattaatatctgtgtcatgattacgtttatgtatgtgtccgggatcatcgcaaagttctatagtatccgattgccttttccctcgttacgtgttcagttgatcggcggcttattattcggtatatatggcacagtactcatgaactattctttccctctgaacgaaactacgattgtagatctacggcatctggccatcgttaccgcagcggtatatatgggaggattagcttcagtcgttacgggactcatgatctcggtcattcgtattctgatgttcggcttatcatcctctgccatagatgcaggttttgtcatgactctgatcggactgtccggtgtgtacttcgcctatgctccttggtccagactgaccaaaataattacaatgaatctgcttggcatgacattaatctttatcatccttatgttgaatacagacagcatgaattcattaatgaagatatatccgttacaaatgaccatttcttttgccggtggaatatttatctatttcatcgcagaattcattaataaatccaatgaaatgttatttctattggaaaaaagagcttctaccgatcatcttaccaacctgagcaatcgacgacagttcgaaaaatcacttcaactggaacttcagcgtgcgcgggattaccaacagaagctttccttgcttgccattgatattgaccgattcaaaaaggtaaacgacacctatggtcattccgccggcgatgcggtcctgaagcaacttggacaactgcttgttgaacatgcacgttctgctgatatcgtgtcacgaaatggtggggaggaattcgccattctcttgctcgactgtggacaccgtcaggccgtggctaccgccgaatctatacgacaggctgtagagaaataccattttgctctgcccgacgggcacacgacacgtctaaccatctccattggtgtagccgtatatcccgatcattgtgatgatcatgacgatgacgacttcttcgaacaggccgatcgcgctttatatgaagccaagaatacagggcgtaaccgtgtgtgtgccttaacttttcgttccttgcctcttacactttaaattccgatctaacctttcaacgttctcaaaaaaaaagggatgtctcgttcgcctattcaggcgcacaggacatcccttgctttatggatcattacatatcatctcagcttgtgtgctgacaggagatcaagcaaggatgctctcaatctcctcgacaatggcagcatccagcttcacgccagatgcagccgcgttctcttttacctgctcaggacgactcgcccctacaagtgcactggatacattgttctggcgcagaatccaggcaagggccagttgcccaaccttcagatccagcttgtccgccacttcaatcagttgacgaactttcccgatacgatccgcattgatctttccttcgtcccatcctagcttggcagcacggctattctctgggatatcggaaacggacgtatatttcccggtcaatagaccttgagcaagcggggaatatacgacttgtccgatgcctttacgctcgccgagcgggataatttcattttcgatataacggtcaaacatgttgtacaccggctgattgaccacgatacgatccaggagcagacgatctgctgtacccaacgcagcttccatctgagccgctgtccactggctgacgcctacatataacactttgccttggcgtaccagatcatcgagcgcgcggagtgtttcttcaattggtgtttcggtatgataacgatggcaataatagatatcgacatattcaacgcccagacgcttcaagctggcttcacattgctccttgatatgtttgcgagacaacccctggtcattcggaccatcacccattttgccaaatactttggttgcaagtacataagagtcacgggaatatgctctgagcgtctgcccaagcagttcttctgctgcaccccgttcgtatacattggcagtatcaaaaaagttaatgccttcatcaaatgcagtttcaattgatttcaccgcattctcacgttccacataccctccgtacgtcagccagcttcccaggctaatctcgcttactttcagtccgcttccacctaatctgcgataatccattgattgcatatcctcctctgttggttataaagatgaagttcactttctattgtaacgtaaccagctcggaataaaagggctttggctcagaaaatggaaaatgaaaaaaagcgcacctataaggtgcgccgaataaagatctatgatcatgatctaaggcaaagtaatgctcaatgcattcaacagatcagcctgtctgaccggcttggtcagaacagcatcaaaggttactgcttcatgcaattcaatgtgcataccataaggaacaagaacaatgacgggcagattctccagtcgctgtttcagttcatgtacaaaatcaaccgcgccgccttccattaatcccatatccacaacggctacatccggcatgaatccttccttgatccaatcatgcgctaatgtcacacccgaggtcatgtgtacgtccatctcccacctgcgcatcagggaagagacgccttgcaaaatgtcagggtccttggcaagcaacacctttttcccttttaaccgctgctgaacacttgcgagttgaggtaactcccagtatctgcgcaatggaagggagatgttgaattccgtctcattttccttcacactactcacctgaatacggccatgcatgagaatggcaagattctggcttacagctaaacccagattgcttccaatcagtttttggatattcaaattttcatcttggctgttaaaggttggtgtcttcttgtccgataacatctgacccgtgtacttcaccttgagctgaagtgtaccggtctcctccaattcttctccgttcaccactgctgtgatcagaacggaaccttcacgcgttgaatcgagagcatactgaatgacgtgtgcaagcaactgtccaatcttgacttcatcaccaacgaacacttgagatacattcagttcaagatttaatcccagctcaatgttcttgcccgtcgcaatcccggcatagagatacacggtattctcaatggtgcctaccagatcaaacggatcatcatgtataaccgttttacctgcttcattaatgttgaaattcatcatattattcagcaaggaaagcagaatattgccgcttgtctcaatcatgttcacatattcggactgctcctcaggcatatccggtgtgcgcatcagatctgtcagtcccaaaataccgttcaaaggattgcgaatctcgtgactcattagcttcaacatctgtgttttggtcatagcctcagattcggcacgttctttctctgcctggagctgttcttgcatttgttccgaatcactcagtttccgctcctgaacatgcaacgtgctttccagatcaacaacataacccaggaatacagccatcgccttcagtgtcttcatatcggtttcgctgattacataaccaggatcatccatcagacagatggtaccaaatgtttcgcccgatcttctcataataggcacgcccacgaaaaagcgattgcctagtccgctcgtaacgcccatggatcgtgtcatcggatgttcacatgtatccgggatcgtaagcacgttcccgttgtctcttaataccaggctgcaatatgaatccgtaaatggaagtacactgcctttaacaactaactcttccgtacgattaaaggcctccaaaatgacattggtcaccccgtcattcgtggcaacaaaaatggtattgaccttcaatataccacttaatacgtctacgatatgggccgcagcttcctttatatcttcatagaagcctcttgtaatgccttctgccgtccccatgattcacccctcttatcttagctgcactttcaaatctgtatttcagaatgtttaatcacgtacaggggtcatcaaaaatccgaatagctgtcacaatctatacttatatgattaacaccgtagaagtataagagaatcatactccctgcctattgcccatttgtggacaaaaacaggtcttaaacggatggtttaacgaccgcgaattcattgcaactcgccttttcagcttgattaaagtccatcttgtccgacttcggatattatacttgcagaataactagaaattatacgcttccgctcagactttgggaacctttatccgtagcaattaaaggaaagtccactttgttcagtaagctgtgtgatcattatcacacccaaaaaaccacatatagtttataaatggataagacgaatctacatatagtatttaacatgaattgaatgataaccaaaatcattttaggaggaaccttacatgaacatgcttgagtatgccaccccaccggcatccgatctattatccgacctgggaagacgaattattggcgcagaagacgccgatacgctgagggaaaatgcgaatctgaacggggattccttcagtggtaagatgagcaggctcggttcggagaccgccaagtggcatgctctgcgtcatgtgttgccgaaagagcttgcccaagctgtggagaatggggatctgtatgtacacgatctggatcagtatgcacttggaacgaccaactgtatctttatcccgtttgaccgtctccttgctgcgggtttcaacacaggtaacggatcggttcgcacacctcagacgatcatgtctgccatggctctggttgcgatcatcttccaatcccagcagaacagtcaatatggcggtgtatcggccaataaaattgactgggatctggccccttatgtacagcgatcgttccgcaaacactaccgcaaagggcaacggctctttggtgaaaatgttctgatcggggatgaacagcttcatctggatagcatcgaagcgaagaatcaatgtccgcgggcatatgccttcgcctatgaagagactgaattggagacaggacaagctgctgaatcactgattcataacctgaatacgatgagtagccgggcgggtggtcagattccatttacttcactgaactatggattatgtacttctgcggaaggacggttggtatcacgctcgttgctggaagcaaccattcgtggcctgggcaacggggagactcccgtgttccctcaacatattttccaatgtaaacaggggatcaatcaggctcaaggagagccgaactatgatctgttccggctcgcagtcagctgttcatcccggcggatgtatcctaactttgtcaatgtggatgcctctttcaatctgcctttctatcatccggaagatccggatacgatcatcgcaaccatgggatgccgcacacgtacactggctgaccggtttggtcgcaatcgtcaaagtggtaaaggtaatctgtccttcaacaccattaacctcgtgaagctcggcatccggtttggcatctgccaaggtgcaagagctgtcgctgaccgagccggattctatactgctttggagtcagttatgcataatgccgcttccggcctgttgcaccgctaccgaattcagacattgcagcctgccaaggcatcggacttcatgatgcgggagggtgtatgggaaggtggagaacagcttggcccgaacgagccggttgccgagctgttaaagcatggaacattatctcttggttttatcggtctcgcggaatgtatgacagctctctatgggcgccatcatgggcaggaccctcatgtacatcgcgaagcgctcaacattattcggaccatgagagagttctgtgaccggatgagcgagcagcataacttgaatatcacactgtttgccacacctgctgaagggttgtccggcaaattcacgaagatcgacagagaacgatacggcttcattgccggggttaatgatcgtgagtattatacgaactcattccatatcccggtataccacactcttccagcgtatcggaagattgaactggaggcaccgttccacactttatgtaacgcgggtgcgatctcctatgtggagcttgacggaaacgttcgggccaacaccgcagctttcctgcgaattgtacagtatgcacttgcgcaggatatcggttatttctccattaatcatccaattgatcgctgccctgcatgtggttatgaaggcgtcattggggatgtatgcccaaactgtggagcccacgagaaccatgtacacttccagcggttacgccgcgtaactggctatctgaccggagattacaaagtacgcttcaatgctgcaaagcaggccgaagtgcgggatcgggtgaaacaccggtgaatctatatggttacatcccggaatcggtaaatgaagggaccggcctgcgtgccgtgttgttcatcagcggatgtcttcacgcctgtccgggctgcttcagtccggattcatggagctttcgagcgggtgagccctttacagaggagcggcaacagcagattctgcatgaagtgacgacccatccgttactggatggcgttacgttgtgtggtggtgatccctttttctcggcagcagaatgtacgtcttgggttcagcagctccgcgctgcacgtcctgatctgacggtatgggcctacacgggattcgaatatgaagaactgattaccgaccctgcaagagcggagcttgcccggttgtgcgatgtgattattgacggtcgatacgttgaagcggagcgtgatgtttcccttccctttcgcggcagccggaatcagcgtttgattgatgtccgtgcaacactagccactcgaaccatcgttacaatgcagctcagtatgctgtaaacattggttttattcccctcaccaactaacaaggcacgggtccccagcggactcgtgtcttgttggcgtatagcggtcttctttaagaaataggttttatccattctctctattttcttctctattgcatgacgatatataatatagatagttattaagttagcatttaaaatttaaccgtttacataaggtaaccagggaggaatcatcttttatatggatattgttcaagcattaattacatgtatgcctttctttcgagatacgattcgtcaggatgtaaccctctccgtgattgatcatgagaaattcctatatttctcagcaggggaatcgttaaaacaactgaattatcaacccggcgaccctctattggatggaaatcgaaattttgctgatctcaacggcggtacagtcaaacgattcgatcactaccctaaagatttattcggtgttccttttgacgtggcttttatccccattaaaaatgaaaaaggtgaagtcatcgccctgtttaatctgctctacagtatggatgaccaagaccagttgcaacagctcatggatgctaccgaaaatctgactaaccagttaattgacagtgtacagcatgtagctgcacactccgaggaactcagtgccacaaccgaagagatccggaacaattccaaacaagccgtacagaaatcaggcaatgtcactcaggtcgccagtttcattcgcgaaatctccgaacaaaccaatctgcttggcttgaatgcagctatagaagctgcccgtgtaggggaagctggtgcaggttttggcgttgttgccaaagaaattcgcaaactgtctgtcgataccaaagaagcaacggcccgtattgaagattctcttctctcggttcggcaatccattcaaggcatggagaatgaactgggtgagatcactgcaagctcccaagagcaggctgaactcgtaaacaatttcatgagcacaattgagcaactgaataaaaccaacaaacaattgaagcaatttgtgcaaaaaatgattacgtttgacggtaaataaaaatacgtgcgatggacaatacaagcacggttcatatcataggaatttgcataattcgaatcctaccgctcaggggatttatgcaaaatggtcattaaacaacaaactaagcctccgaataagttcggaggccttttcatgagctatttgacttaacgaatctcaaagtgactgatgcgcacacccgcagacaacataatgtatacatcctgcgcacctgatgcacctgtgagttccgccttcacggtagaccactgctgggcttcaccttgtgccagttccacacgtcctgcgagcgtaccgtctggtgaaccgagtcgaacttccaacacagcgcctgctttttccgcggatacacgagcttcaattgctgctgccccactacccagatcggcatccttaaaggcaatccatccttgctcaccaactacacggacagcacttccgccctctttgctttcatccagatcaacacccaggtaagcatcataattctcggcacgagtagccacacccagattacgggcagggatcgtctctccttctaccgtcaggtctgcaaccagctgaacatcggaggatgacttggcaaccataatagagtaagttccactttccacgacataccgatcacgagttacatcccagattgccagttcctgaacaggcaaagtaaagctgaccttcgctgtagctcccgcttcgatatgaagacgacggaatccttttaacgttttgagtggacgtttcacccgggatttgcctgcacgaacgtacaactgtacaacctcgtcgctggcaattgaacccgtattggttacatctacagttaccgtaacgttgccctctgtacccacttgagctgggctaagttccaaattgctgtatttaaatgttgcatacgtcagaccatgtccaaacggatacaatacattgccttcaaaatattgatatgtccgaccagattgaatgatatcgtaatccttgatgtcggtcagttgatttgccgattgtacccatgtcatattcagacggcctgctggtgcatagtcgccatacaagacgtcagctactgcgttacccagttcctgtcctgcgtgtgaagtatacaataccgccgggatgttctcctgaacccagttggatgtgaacggataactacccacgatgacaactaccgtgttcgggttcgcggcatagaccgcctcaaccagacgttgctgggattcggcgagatccagacttggacggtcaatctcttctttaccatttacaaggggattattaccaacaaagacaatcgccgtttccgcagccttagccgctgctaccgcttcttcaagtccgttcacaaccacatcctgcttgaacgtctctgtggcaccaaaggttttcagttcctcggacactacgaatgcatcgtttccaccattaggtgcagtcaccgttttgccattccaagtagtcagacctacactgccatcctcttgtggcaacaggtggaatacttccttcacgaaccagccgtacacttcatcagcggaagccgtaacggtctcttcatctgtggtcagatatttgccgttgctttcggcctgcaaggtataacttccgaagccccagtcggaaaccatgaacgtctccgcttctcccgaagcaatcacaggtgatttttcaccttctgccagtccaattttcttcccactggctacggaagttaacgtaatacggtcattaccatccttaaacgatactttatcgttgcctactttgccacggatcgcttcaagcggggatacgttataaggcatggtgcctgcataccagtcacgatacacggttccgcccaattgaccaatcacagccactttaccagcttttgttttgtccaacgggagcgtgcctttgtcgtttttgagcaatactacttgttctctggcagctctgagcgacagttcttttgctttctctgtcatcatggactcttcaccaatagcagcatacgggttgccttcttccggatcgaactcgcctagacggaaacgcacacggaacgtattaaacaacgctttgtcgatgtcatccatcgtaagtgtaccttgttccaatccttcacgcagtgcctgtttggacagctcagcatcatcggtgatgctatcaattccagctttaacagactctaccgtacctggtgtgtgggaatcatagtatttatgatcattcatgatgcccattacgtcacctgcatcactgacaatgaaaccatccatgccccattcacctttgacaatctcgttcacaaaaggatgcaacaacgctggcgtaccattaatagagttgtacgccgtcatcatggactgtgcgccgccttccttaaatggcttctcaaacgccttcagataatattcacgcatgttgcgcggatcaatgctggacgaaccgcttccgcgatccacttcgttattattggcgaggaaatgcttcaaggtagcgaccgctttgtaatactttggatggtcaccctgaattcctttgaccaatgctgttgtcagctcggctgtcagttccggatcttcaccatacgcctcttcattccgtccccagcgcgggtcacgttccatatccactgtaggtgcccacagcgtaagaccgttcactgccggatttcgtttataaaatacacgtgcctcgtctccgagtacagagccaatctctttcatcagatccgtatcccatgtgcatgcaagccccaccggttgtgggaaagatgttgcttctccaagccaggccaagccgtgggccgcttctgttccatgtttgtatgcaggcacacccaagcgatctactgctggctgatattgcagcatggattcaattttttcatcttccgtcaagcgggatacaaggtccttcacacgggtgtctaactctagtgctgtatcttgaaacggatatttcgtttggttggtcgtcatatggaatctcctttggttatcggtagttaataaaaatgatagcgaatacatatctcataaaaaatcgggggttaattcggataaaatctttcttccgatggatcaattaatccttttataatcaacgtttataggtgtaaatcttgatctctttttcaaaacctaaaacgatttcggtaatcttatcatatagcatgtttaacaaaaaaaacagaggttctgcgcaggaaattgtgaacatcccctctgcaaaatctaaacaacaccgttttttcctggcatagtctggcaatcatgaataagagtacaacgatgtgcgctgaacaacaccccatgcgatagattgaagataatcaaggaggaaaaaaaatgagcgacaatcagcagcccaagacgggtctgcccccggtccccgaatcgctgtggcgtgctacgcatcaattcgatgcctatccaaaactgaccgaagatatcaccgctgatgtagcgattattggtgccggtattgccggcattactacagcctatttgctggcgcagacgggtatgcgtgtagtcgtgctagaggctggaaaagtattggatggcacgaccggtcataccactgccaaggtatctgcacagcacggcgtcatatttgatgaaattatgcatcacttcggacaagaacaggctcggatgtactatgaaggcaatgccgatgccgcgaagtggatgcgtaatctcgtgaaggaaaaacagattgattgccagtgggcagaggaagatgcctacgtctacattcaatcggaagaaaacatcaaaaaactggaaatcgagctgaccgcctatggcaaactcaatatccctggtgagtgggtagacccactccctattccagttcccgcaagggcaggtattcgcatgccgggtcaggcacggtttgatccgttggcctacctgcactacttgctcgattccgctgtgaaacaaggggttcgtatctatgagcataccaccgtaaccgatgtggaggaggatgcttccctgcatgtcagaacctatggagatggcccatccgtaacagcggaacatattgtcgtggcttctcattttcccgtctatgatcccggattttatttcacacgattacacgccgaacgatcctacgctgtattagtcgaaccggagaaagcctatgcgggtggcatgtacatctcggacgatacaccgtaccgctccttgcgtaccgtcttacatgatggtaaggaacttatcctctttggcggtgaaaatcataaaactggacaaggcatctgtacctttggtcattatgaacgcctagagcagctcgcagcggagacatttggcattcgcaacattccttttcgctggtcagcccaggatctgatctccattgacaaggtgccttacatcggaccgattaccggaagacatgaacgagtctatgtggcgaccgggtttgccaaatggggaatgacaactggcacgatggcaggacaccttcttgcggatcgcatcactggacgtgacaaccctcatgctgccatattcgatccggcaagattcaaggccgatcctggtatgaaacactttattgtggaaaatgtgaatgtagccaaggaattaatctccggtaaagtaggcattgtgcacaaaaaggttagcgatattggtgaagacgaaggagccgtcgttcgtcataatggcaaacgtgctggcgcctacaaggacaccagtggcaagctgtttctggtggataccacctgcacccatctgggttgcgaagtcgaatggaacgagggcgaacgttcgtgggattgcccatgccatggttcccgctttgattatgcaggccatgtcattgagggccctgctgtggaagaccttaaagtcctagatgcacaagaataaccgacatttagcgattaacctgtaaccaaagaaacaaaagttcatctcacagaccggatcggaatccgcctccagacggaagtaaccgatccggtttttgcgtatgctgaattatagctaaacagacagcttcagctgatcatcagtattaaacgaacttattatcgatcaatcgtgatacggaactattttaaagtcactaccttgcattaaacagtactggatgctatgatgaattcaccactactgaacaatatacaatagcgataaatgaagctactaaggaggaacctgtgtgaatgtgaacatccagttcaaaaaaggagtattagagctgtgcgtcctggtattaattaaccgccaggatcggtatggctacgaactggctcaggcggtctccaaacatatcgaagttgctgaaggtgcactgtatcccttgcttcgccggcttgtgaatgacggttactgcaccacctatcttcaagaatcaactgaaggcccgccgcgcaagtattaccgactatccgatacaggtcgcgactacatgacggcactgacgacagaatggaatgaatttgtgcgcaatgtcgcaaatctgattgaggaaggaatccccaatgaatagacaacaatttatgaaagccatggaaattcatctacggccgatggacccattcgaacgggctgagttgctcgccgactatgatcaacatttcgagcttggactacgagaaggcaggctggaagaagagatcgctcgggaactcggacagccggaagaaatcgccaaggaagtacttggtgatcgttatgacattcatacgccgggttcagatgcgttctatgcaccgacgtatcgcgaaatgcggtcacccagaaacagcaccagcgccactcgcaaatttttcacagccatcggcctgttattcctgaatctgattcttggcattcctcttggtctcacgctatggtcagtatggcttacgctcgccagcctgtccttactggtattggctcctgtggcagcagttgtggactttgtattcctgggccaactcgataaaccggaaattttcgttgcgattggcgctttcggtgtcggcattttgtttgccatcgcatcgaagtatgtttttagagccttcaaaaacactactcttcaatacattcaatggaataaaaatatgatgaaaggagatgtttccgcatgagtaccaaaaaatggattgcgcttgccgtgatatgtatcggaataggtttgctcgggacatccatctatggcgttcagttcggggatgaacgggagcattattctaaacgatgggatttcaaagcagatgaattgcagaacattatcatgaatgctaatttcagtgcagatattgaatttgtcataagccccgattcgaatggttatatcgaagtggatggtaaatgggaccctaccgtagtcaaaagcttcgaacaagccactttatccaaaggcacattccaactgtctcagacagcacgtgaacgattgcaatttttcaccttgtactggaatgatcaagactccacaataacggttgctctgcctgaaggacaccaattaaatgaggttaagctggactcctcttcaagtgactgggatctgacaggtctgaatgccaaccagcttgagctgaacaatacctcaggttccatacgtctggaaaatattaaggcgcccaatattgaattggttctaacttctggtgacattaacgcttccatgattgatggagacatgaccgtgaaacagacatccggaagcttcactgctgatcagatagtcggtcaagtcaacagtgagattaaatcaggagatattgagatcactgaattgaatggtgcggccgatgttaaattcacctcgggtagcattcatattgaacagtcccatgctgcgccaatcaatgcatccggaacatctggagatattttcattcaagctgcacctgattttgacggaatctatgatgctaaggctacttccggaagtgtcgatgtacctgaatcgccaatggtgagccgcgaagtgatcaaggcccgtacttcttctggtagcatcgagattaccagatagtgatgaagccaatttccgaactgtgggtaataatagtataattgaatgctagtccatttctaaggaggaattacccacatggaacttaaaaataaaacagcgatcatcacaggtgccggaaaaggtatcggccgtgcgatcgctgaagctcttgccaaagaaggagtgcacctcggccttattgcacgtaccgcttccgatcttcaggctctgcaacagtctctgagtcaagaatacggtgtgaaagtaaccagtgcagtagcagatatctcggatcgcacgcaggccgaagccgctgtagcagccatcgagatggaactcggtgcggtggatatccttatcaataatgcggggatcggaaagttcggaacgttcatggagatggagccggaagagtgggagcgcatcctgcatgttaacgttatgggtacatattacgttacacgcgctgtccttccgagcatgatcaaggaaagtagcggcagcattatcaatattgcttccactgcaggtgagcgcggattcgctacaggttcggcatactgcgcgtccaagtttgcattgcttggcatgaccgaatctctgatgcaggaagtgcgcaagtccaacattcgtgtaacggcactgactccaagcaccgttaatacggagcttgcgaccaatgccggactgaaaattggcgacgaagatcgcatgatgcaagcggaagatgtagctgaacttgcactcgcaacgctcaagctgtccgaccgtgtcttcgttaaaacagcaggcatctggacaactaatccacaatagacagttccagttgcttctgacctttctaaggaatctctcgcaccttattgtgctgttttgcaggaaatgagaaacgtaacgaatcactgcgaggttatttcgccagaagtatgtggaatgtagccaaattacacacacaagagtgaaataaagcgtctgagattcgttacatctcgatatctgcttaaaatcatctaatagggctcactcagttcgttagaaatataaaaggacgtttcccattgtacatgtatgcaggttcgcatgttcatgacttgggagcgtccttttttattttataaatgatccagacccaattctttggacaccgcaatgagcaccaccgcaggttcctctccgatattggtcacttcatggggcacgatcgcattccaggtaaacgaatcacccacttcaagaacttccacatcttcgctttgctccgcacgaatcttgccctgcaacaccagatgactttcctccccggcatgtttgctaaccccggtcgatgcacctggcggtaactccacaatggacatacgcatcgcacctttggcggtaagctgctgcactttaatctgtccacttccagccgtcgtctccttacgctcgtttttgcgtaccacgttcattcgttgctctggtgtcagcagcaaataaggaagtggcacttccagataatccgcaatactttcaagcgtagcaatggaaggtgacgttttgttattttctacgttgctgataaaacctttggacaaccccgttccctcacacatctgcatgatcgtaatctgtttctgtttgcggatcgtacgaatagccaagccaatatccatatcgcgtccctcccttctattcatctatataagacaccagacgtaagcttagctacttcaggttatctattcggcgcttgcctcaacaaatataattcgattaccaaacggatctgtcacggtcatttctcttgattgccaaggggtctcctctataccgggtctcgcatgtttgtactctttctgacgaagtgcaccatggaatgtatccaagttatctgtctccacgcgcaaggcagctccaggtgtacaatctccatgatgttcggataaatgaatcacgatggaatcgagtgaaatctgcatatataagggcatatcttgctcaaatcgatgttcccaatccaattggaaacccaggtattcaaggtaaaactctctagctttattttcatcaaatattctcaaaataggcacgatactctttaacatcctaatcacgtcctcgggaataagatataaaccattcgcagcggcatttattgtagaaccattcaagattttttataaacaacatatattcatcatacaaaaaaagtattgaccctacaatgaaaccatgataaattttgttcataaataagaatatttatttcatattggtgaactttgttgtcagaacgatatatttaactcattcctcttcaggtggtggtttcaatgaattctccttatatacatgaagtccgattaccgtctcattataattcagatcagcgttaccccgtaatcttcgccttacatggtatgggatcagatgagcaagatatgcttcgtttgatggagcctatgcagtctgatttcattatcgtcgccatccgtggacctatcgttcagggtagtggttatgcttattttcagatcaaaagcattggcaaccctatccgtgaattgtatgatgcctccgtgttgggactgcaacagttgattgttgatctgtccgccaaatatgctattgatcccacacggcgttatatcgccggattcagccagggcgccattatggcaatgaccctatcgctggtgatgggagatgcaattaaaggcattgtagcgatgagtgggtacatcccgcaatttgtgaaagacgagtacatgctacaccccgattcggagctgtctgtgttcatctcgcatggagatcaggatcatctattcccgctgcaactgggcgaagataacgccaatttcttccgtcaacacaccaatcacgtcacatatgtaccttacaacggtggacaccaggtgacccccgaactatatcaagaatttcaacactggcttcggacggatgcaaatctgactaccgaagacccgaaaggactgaattcataatgatgccatctctttttattgctcacggtgccccatcactggcactggaggagaatgcgtacaccgaatttttgcaaaaacttggacaggaactgccgaaacccaaagcaattgtgttgttctctgctcactgggaatccacaactcagcttgtatcctcggtagccaactatgagaccatttatgatttcggcggtttccagcccgagctgtatcagatcaagtacccggctcaaggacaggcagagaccacagccgaagtggagcgtttatttgcagaagcaggaattccggtacagacggatgatgttcgtggtctggaccacggcgcttgggtcgttctgcgcctgctctacccggatgcggacattcccgtagttgccttgtccgtgaatcgctatctgacaggtgagcagcaatatcaggtcggacatgcgctcgcttccttgcgtgagcaggacattctcgtgattggcagcggcggaactgtccacaatctgcgtcgattgaactgggaaagtaacggcgttgacccgtgggcatcagagttcgacaactggctgcatgacaagctggtgagctgggatacggagtctctcttctcctatgataaactggcaccttcagctcaagccgccgtgcctacgccggagcattttgtaccgctgttactcgccatgggtgcgggagatcagaacaaacaggcatcgctcctgttcaaagcctatcagtatggcaatctgagcttgtcctgttggaagtttgattaaagaggactatgtaaaccgaactaaagtatttacactcgctactccgatgacagaacaaccttccgatcgctgttatccccagatttttttatttactttatataaaggtgaaaatctggtgataagcttatgcttccgatgtagctttcttgcagaaagcttttaggcgaacacttcgcttcttcaggttatttctgtcctctacgttttcgtgtaaaagattagtttcatttataaagcagattaaaaatgtagcgtgggttacagggatcattcctgttgctcacgctttatttgttgttaagagtgactgccatgatggatgtacataatcgattgtgatggagctaagtgtgctgatatgcaacaaccgccctttaaataatgagaccattgtagtatgtaagcaaggactccggtttcttgtgtgcttttccggattataactataatatgaggtgaaattagaatcagtttgcgcgcatatcactcaccatattatctgaatagttcatacggagggaattagatgccagaacagcgtatatatgaattgatggaagaactggatatgttgctggaggagaaggtacaggatgaggaaaaccgggagctcttggaggcatatcgcgagtttgaaggcgtgacggatgagcagctcgacgcattcgagcgtgaacaaggtattcgattacctgctgattttcgtgcgttttataaacttaaaaatgggagtggttatggctttcacgtcttgtacccaagccttgaggaaggacgggaatccgagccattttacctattatccctggaaaaaattcaaaaggagcagtccacgctggtggaaaaccgcatggatgattattttaccgaagaagagatccgtgagcttgatccccgaatcaaaccctacctttttcaaaagaaatggatcacgtttggcatgcttggaggtggttcgctgtatctgatgttcgactttgatccgacagagcaaggaacggttggacagattattatgtacgtgcatgacccggattttgtatattatgtcgctgggacgtttacggaactattggaacaatccaaccgcaatttacgtgccttggaagccattgagtactgaaatgcgcatgatgatatgaccttttttgcataatgctgggatatatcaaagcggttataataacatttagtggaaatgcacatgctgtatagataagactgccttttctacacctaatacattgatctgggaggaacatacgaagtggctgaacaaccgaagtctgagagctttatgtctctcatcaaaaaaggaaacacatcctccgccgtagcgatggcaggtaatgctgttcttgctgtatgcaaagggggagccttcctattcagtggcagtggcgccatgttcgcttcggcgatgcattcactcgctgatgccattaaccaagggtttgtctttgtcggaagtgtgttgtccgagaaaaaacctacacgccgcttcccgaccggattcggacgggtcattaacattttctgcatgatcgccgttattgtcgtgacaattatggcctatgagacgatccatgagggcatccatctgttgcagcatcctgttggtcatactggcggtctatggattaacatcggagtgcttgttctgaacattgtcattgacggggccattctgatcaaagccatgaaggaaattctaaaagaagcacgcgcacccaaagccgccggatttgccttggtccctgctgccattaaaaatgtaggccgtgctgcaccgccaacccgtctcgtgttctacgaagatgttgtcgctgtactcggtgccctgcttgcgctgatttccgtcgtggtgattgccttgaccaactttgcattgctcgatggcattgtgacaacgattattggatgtctgatgatcgctgtagccttccgtgtcggttacgataatatgatcggattgatcggtgttgcggctccgcaggatattgaggacaaagtgtcccagactattctcgcagacacacacgttgctgacattcagatgatgcgtatcattcaggaaggccgttattatcatgtcgaaggtctgattgaacttaccaaaggactcagcctggctgatgcggatgacatcaagttccgtattcaggagaaactgatgacaaaccccgacatcgccgacgctgccatctccattattgaggatgacggtgtgaacagctggggcaagaaacattcggatgtggtgaaataacaagcttcgttttggatgactcagctttaccattcagtagttgctcaatttaagtttaactgttgactaaacagtcaacgaatcgtatattattaataacagatctcgcccgcacctctgcttatgcatgtggaacagggcgagacatttttgcgttatgggggtattttccttgccagatgagattcagctacgtgaaatgaaagcgcctactacatatgaagaacagctcgaaaagtttagaaaccgaaaaatgacaattgaaaatgaagtagaagcgattacaatcctgaaacgcattcattattacaggtttactgcatatgccttaacttttaaacaggatacttcggataactacattgaaggaacgactttcaacaaagtgtataagcattatttgtttgatgcagcccttagaaatcactttatgaagattgtcgagtacatcgagattgccttaagatcacaaatttcatacaagctcgcccacaagtatggtgctcttggatatacgaatgccgctaatttttctaaaattcaatttcaccaacgctttatggaggatttgcaaaaatgcattcaaaaacagcacaaagaagtgcttattgctcatcatagagagaattaccaagatagatatcctatctgggcggcctttgaagttagtacaatttctatgatgtcctcactctataaaaatttaaaaacgtctgacaaaaaatctattgatcgagaatactacccttctcgaaacataagttatagggaacttgagaactggttccacgtcttaactgtttttaggaatagatgtgctcactacagcagactttttaattatagaatccctgttaccataagatacacacgaaatgatgaattattaggcttagacaaagcctttctttttggagctatctacaatgcgaagtacctgataaaggatagaacaatctgggatagttgggtgactgagctatcctcattaatcgaagcttacactatagttgatatatcccttttgggattccctacaaactgggagcatctgctacgaaagcaatgataattctctcttgcaatatgcaagcctaaatcacatttttctgtgtaacttgttcaccaccgtttggcacagattgtttgcatgaaaaaacgactgagtatctttcgaacctagactttggtctaggttcattttaactccaaagacggaggatagagttttccagttcatggtatgctgtgaataacgaaagtaattgctctacatacaactgttcggaaaattgatcttgtattaagaaggagagatattatggctaaacgtacgatccttgcgcctgttctcattttgctgggcgtgtacctgattctgaaccagggaggttcactcggtccaggtacaatcttcgctacattctggcccacgttgttcgtgattccgctcgggctgttcttccactggctgtacttctccatgattggcagaggggttggactgctggttcctggtggactgctgctcaccgtcggtatcgtctgtcagatcgccatgttgttcaacaactggagtacaatgtggccgggcttcattctggctgtagctgttggtttgttcgaattgtattggttcggtggtcggaacaaatggttactgatccccatcaacattctaacagttatatcgctgctgttcttcgctgtgatgtcgattggcacgatgctgagcagcttgagctttatccaaccgttcgtggcgattgtgctgattatgggtggggcatggatcatggtgggtcgcaaaaaacgcatgtagtggcaattatataagatgaatggggtgcgattaactgagtcactgcggtgacagcacaacttcggatcgctgttatccccggatttttttgaatcccatctagcaatgggaaaatccgttgataaaggcgaccgcttcgcttccttcgtttgttctgcccgcaccgttaacgtttgatcttaaatgttcatcttatatggcacttcaagcgctattgctctgaagtaagtaataaaaaaggggtgctgctcgtcattcaaatgaaatgacgagcagcacccctttttgttttttttgcaaatctaacgaactgtgcacacgttattggcggttatttactgtgcattttaaactccaggaacaggtcgttataatgcgagagcatttttttgcccagattatcgtagacctccagcttgcctgtcagtgtctcgtctggatagaaacgttcatcctccgagatgtcctctggcagcagcttaagtgcctcggcgtttggtgtggaatacccgacatactccgcattgcgagcggcatgatccgggtccaacatgaagttgataaactggtgagccccttcaatattactcgctgtcttcggaattaccatgttatcgaaccagaggttcgagccttcttccggcaccatgtaatccagcttgtcgttctcatccataatctcggatgcatctccggaccatacaagtccaactgcagcttcctcattggcgagtaacattttgatctcatctccgacaattgctctgacgtttggtgtcaatgtagacagcttcttcagcgcttcttgcagatggtcttcgttggtatcattcagagaatacccaagactgtttaatcccatcccaataacttcgcgtgcgccatcaaggagcaggatttggtttttcagacgcgggtcccacaggtcgttccagctatcaaacgtcaatccatccaccagttcgggattgaacacaacccccactgttccccagaaataagggatcgagtacttgttgccttcgtcaaaggacaagtccaagaaccgcggatcgatgttgctcaggttagtcaatttgctgtgatcaattggaacgagcaggtcttcctctttcattttgctaatcgcatattcggaaggaatcgccacatcaaacgtagtaccgccctgctcaatcttggtcagcatcgcttcattggagtcaaacgtctgatagatgaccttaatgcccgtctcgtcctcaaattccttgagcagatcggggtcgatataatcgccccagttatagatggtcagtgtgttgccgccagaatacccctgactcttgttcagatacgaagccaggatcattagggcaaacgcggccacaaaaacaagcgcaaatgtccgtaccagttgcttcatggtcgcagcccctttcctcctggaggtatccgtgttgcacggcggttaatgaagtaatatccaacaactagcaacacggtcagcaggaacaatagggtggacagagcattgatggacaacgaaacaccctgccttgctctggagtatatctctaccgagagtgtggagtatccattacccgtgacgaagaatgttactgcaaaatcatcgagcgagtacgtcaatgccatgaagaatccggcaaaaatacccggtttcacgtatggcaacaccacacgcgtcagaatctgccatgaaccagcacccagatcgcgtgccgcatccatcagagttggactcatctcctgcagcttcggcagtaccatgatcacgacaattggtacgctgaatgcaatatgagacagcagaaccgaagtgaagcccagtttgataccaatcatggtgaacagaatcaggaacgatgcaccaatgatgacatccggactaacgatgagcacgttattgagtgacagtagcgtgttcttggtccgtttgcgacgcacatggtagatcgccagtgctcctgctacaccaagaatcgtcgagagcgctgatgacaggagcgctatgataaatgtattcagcacaatgatgagcagccgagtatcagcgaacacctctttgtaccattcgagcgtgaatccttcgaagctgcgcatatggccgccactattgaaggaatagaagatcagatacgcaatcggtgcgtacaatatggcgaatacaacggctagatagacgttagacagctttccgtttcttcccattacgcacctccttcttgcctgatccagtcaggaacataataatcgccatcgcaataatcaaaaagacggcaattgttgaacccatcccccagtcttgggtgacgagaaaatgctgttcgatcgctgttcccagcgtaattacacggttccccgcaatgaggcgggtaatcatgaacagagacagcgcaggaataaatacagcctgacagcctgattttactccactaatcgtcagtggaaagataacccggcggaatgtcagccacgatgaggctcccagatcacgcgccgcatagatcaacgatggattcatctcttccagcgcattgaagatcggcagaatcatgaatggaatgaagatgtacaccgagacaaaaataaagctgaaatcggtgaacaaaatctgctgtgtaccaatacccaccacttcaagcagggagttggtcagaccgtacgttccgaacaggccgatgaaggcatacgcttttagcaaaagattgatccagcttggcagaatgatcagcagcaaccatagctgcttgtgcttcgtccgggtcagcatatacgccgtcgggtaggagattagcagcgagaacgccgtaatcagaaatgcataccagaacgaactgagcgtcatctgcaagtacaccggtgtgaagaatcgggcgtagttgccaaacgtgaagttgccctctacatcaaagaacgaataatagatgaccagcagaaccggcgccacaacaaacaacaccatccataatacatatggaatcagatacgcattgcgtgtgctggccttagtctgcatgagcggcctcttggtaggcttcgagtcgtttgtcgaactcttcttcggtctcgttaaagcgcataacgtgtatcgcttccgggtcaaaatacagcccaatccgtgcgcctacaacggctttcttcgttgaatgaacaagccactcattgcccgcatcatcgtacgtggatatctcgtaatgcaccccgcggaataactgggagtccacattgaccttgagcttgccttggtcttcggttgtaatctccagatcctctgggcgaatcacaatctctaccggctcgtcccgctggagaccctgatcgacacactcgtgctgtgcgccagcgaattccaccacaaagtcctgcttcattttgcccgatacaatgttcgattcaccgataaagtctgctacaaagcggttaatcggctcatcataaatatcattcggtgtaccgctctgttgaatcacaccgccattcaggacaaagatctcatccgacatcgccaaggcctcttcctgatcatgcgtaacaaagataaacgtaatgcccagtcgctgttgcaactcgcgcagctcgtactgcatttcggtccgtaatttcagatcgagtgccgagagcggctcgtccagtagcagaatttcaggttcgttcacaatggcgcgtgcaatcgcgacacgttgtcgttgtccgccggacatttcgccaatttcccggttttcatacccggatagattgacgaatttgagggcttccaacactttgctgcgaatttcagccgttttcatctttttgatccgcaaaccaaaagccacgttctcaaatacattcaaatgtggaaataacgcataatcctgaaatacggtattcacctgccgctggtgggcaggcactcggttgatgagcgcaccgttaaaataaatactgccctgtgtcggctccgcaaaaccggcaatcagccgcaatatcgttgttttcccgcagcccgatgggccaagaagcgtataaaatttaccccgctcaatctcaaagctgaccgccttcaatacggcttcatcctggtcgtattgctgagtcaccgcttcgaagcggataatcggttgttgttctgacatgcttcacatcgcccccttatacttgaggtacatcttaagtctgtacacttttcgttcatgcatccttatagataacccatctattatatatgattcaggtatatccgcaatggttttgatgtaaacgccgcgtgtcatttcttcttattttcaaaaatcctgcatacattacgtgtaatgtcgataatacgtacccatatggagtaaatgaaggatttttaggattccattttatgtgtgagaggagtcttggctcttggatattcgccgtaacctgcctttgctgatgaccatttgtttcttaagtcagatgggcggattcatgatcctgcccctatttcctttgtttattgaggaattcggcctgtccggctggatgatgggggttatttttgcgcttttttatgtggggaaagtaattggtggcgttcctgcagcggcaatttataagaaactaggtggtaaaaaggctctcatcctcatgctgatactgctcgctgtctgtatgggcggcttcgcgctgtctactgctgcggtgttattcggcctgctccgacttctacaggggctcgcttccacgggccttaccgtggtcgtacgttccatcatcggggatggaggcaatgtagacaaccgcggcctgtacaatgggtatatcagcagtagtgagggcggcggcatggtgctcggtccggtcataagtggctggctcgcgctgcactggccattgtcggtgccttttttactcgttaccgtatgttgtctgatggccgtggtcgctgcgatggggatgaagacaacggcacaagctagagctaatcatgagtctggggatacgctaagtgatcctctgatggaagagccttcagctggcgtaaagcaagaacctctggacaacttaacacattcactactctccacggatgaagttgtagaacccaccacaaatgactcccaccctgatactactgtatcaactgcgcctcctttatcttcatcaccttctgatgcaaagtatactcaagatttgtctacaaggcgcacacagcgtcaacagcttctcggttacggcacagtacattttctggagatgagcgcgtatgcggtattcctcacctattttgcactgtatgcagctcacatcatgcattgggacccgtttgcaaccagtctcgccttcaccgtctcagggatttctactcttgccgctgctcctttgttggttatctctctgaccggatgggcgatcgtctgttgctttgcatgctcggcatgttcctcattggaatcgaagttgctgtatttctaagcacgtcctcccatctatgggtctacgtcgggatgttgattggcggggtgggcggagcatgttacatggattcgttctttgctcatattggtgatcatgtcccggacgagaatcgaagctctgtcataggcaaaattgtctctgcggccgagatcggctccatcgtatctccactggttgctgcgttgcttacggaagttggatcgctttactctgtgtttgtgttcaatctggtgctgattgctgttgccattgtagttcaggctgtgatgcgcagtcggtacaagacaaggcgggtgtaaatgcaaaagggagatgtcccacaagtcatgaatatgacggaggacatccctttattggcgtaattattttctaacgaactacacaagtgttattcgcttcaatttccacagggcggtattttaacgaatcacagaagtactatttccccgaaatggtgcttcctcatcggtttcaggcaggttaatgccgatatatcgccactgaagttcgttaaattacaattccataattaatccgccctgtaaggcgcgctcggttcgtaagctttacaaactcgtgagataaaccgtttcggtggcaacctctcgattatatttttcccaataatgttgctatgtgtactgcattttcttgaatttttctttttaagtaagggtcggtcctttcaggcaattccgttggtttgaaaaattctgcttcaagaacttcaaccccatctggcttcagttctccctcatactccgtgcaaatataaccaatgaccacattgtagtattcatgcccatttcttaatttcgtgtacaactcttttcctgagaagacgccatacagatgaagtttcttgatctctatcccaatctcttctctgacctctcttattgctgactcttccaccgattcgccgagctccatgtttccacctggtactccccacgtatcatccagatgtcgaactaatagaatctcacctgtcttgttcaagatcaatatactcggtctcaccaaaataacaggagcattgccaaccattcctcgcaacgtttcaatgtaacccatggattgttacctcccctatgtgaagtcaaagtcatggcttcattataggtgtgttatatatttccatatagagaaagaatattttcatttttttcctattttaaagcccttcgtttgataaaaaaggatcacaaaaaataacccgtctgcacaatttagtgtgcaaacgggcatttcattggtgtatctccggcctgtggctggggattctctacctgtgtattctgctgctcgttgcttcgcggctctgcggcagatgccacgccatctttcagggtatacgcctgatcctgatggaaaaagttcggcttcacgatctcattacgataggagctgtggaaaatatgtgttgtcgccggggacactggcggaatcagccacacccaatctccggtcaactctcgccctgccttctcttcccgctgttcaaataactcgaactgcgctgccgccgtgtggtgatccacaatgctcacacctgcttttttgaacgaatgcaacacagccacattcagctcaactaacgcacggtccttccacaatgtcgtttcactcgacgtattcaatccaaacgcttccgccaccgcaggcagcttgttataccggaacgtgtccgccagattacgggcaccgatctctgtacccatataccaaccattaaacggcgctgccgggtaggatataccgccaatctccagtcgcatatcggcaatcatcggcacaccgtaccaacgcatgcccagatcggtaatctccgctcgttccgggtgttcaatcatcacttccacaatctcttcttcgggtacaacataccactccggagcttgtccttgtgcctgaataataagcggtaatacatcatatgaggtacctgccccttgccagccaagtgacatcgccgccttagtcagttccaccgaagcaggatctccaataataccttgctctgtctcatatcccgcataacgaatgagctgatgattccatagttgtaccggagttccattcggcccatccggcggaaggatggtaatcatcgggattactttgccaccgttggatgccacatggatatgattcagcacagcttctgctgctgttcctgccgtatcagcgtgacgggcgtccacgatccgcaatttatcccagaatagccgtccgatgcagcggttgctgttccgccatgccattttacaaccctgctccaattcctctgtggtgtgcacataagtacccgttacttcgatctcgcccataacggcaacaagccgggcctgtgcgtcttcacgcgaatgacccagctcttcataacatgtatatataaaccgttcagcttcttcctgcaattgttccaggtctgaccgcatcgttcattccaccattctgtacatcttgaatgccatcattatacggcaagcgcaccggatttgtaagcgaacggacactttgttcacggactctacatatcgttgtcaggatgtagggtgactttgcttatttgcccagatatgcgtttaacatccaaacctctttatccagtgcagcagtgaatccaatcagcatatcttccgttgcgttatcgtctacttctcctgcttcgtgaatgccttgacgaatcacttccaccatcgtgcgtagatcagcaactaccgactctaccatacgctcagcagttaacggtccttgtgcctcttcaatcggagacagacgcagctgttcacccatcgtagccactggacgtccaccaatagcaagcaaacgttctgcaacttcgtccatatttgccgtagccaagttgtacagttcttcgaatttggcatgcagtgtgaagaaatgaggcccttggacataccagtggaagttatgcagtttcgtgtacagtacggaccagcctgcgatctgacggttcaggacctcttgaagtgctgtggcgttgttagcaaaagtgttgtttctagtttggattgtgctcatggaatttatcccctctcgaatataaaaatagaatttgaattttataatggattgctttgattcgttaattttaatttagacttaatctaaatcttgttttaattataacaccgcatatcctgtttgggaaggattttgccctgtcttgtacatgaagattccatgaagctgagcttcatcctatatcattataaaagtggagttcactggccacacggctgattaatgaggatctgtagtactgcttgcaccagatcccactttttatttatacctttaattacgctcacatactgcgaatattctcacagtgcaaataacgcaaaaacagcccttcatctccgtgagatgataggactgcatgaaccacctgtacaattttattgcttaacaaactcaaaagtcaggatgcgactgatctcttcatagcttgatgctacaaaatgaggttgatgatcggactccggcagcgcctcccgatggttaaaccagatgactgtccatcctgcatccactgcacctaccacatcattacgccacgagtcgccgatgtaatagctggatcgggcatctgtcccggactgcttactcacatattcgaacaaccttcgatccggcttcgcataaccagtcgtaccggagataaagaccagatgctcgtccacgagactgagcacatccagtgcttcaagcttgcggcgctgatgctctccttctccattggtgattagaccaacggtatggccttctgcctgaagccttctgattaactcatacgctccttcaaaaggtacaatctcgaactgtctgctcagatactgtgcttgcaattctccagcttgtcccaattgtaaggggagtccaaactcttccatcgtcagctcaaacctccgacggcgcattcgctccaccgcatccggctccggtacagcggacagatcttcttgtgcagacaaccagtcactataatagcgaaaacggtgataggcctcagcataagggaaatcatccggcaggccgagaacgtcctgcaacgcgccacgaagcggctgcaagtgatcgtataaggtatcatctacgtcgaaaaatatggttttagcttcattttttatattcatagttgttactgatccccctgctcctgtctcaagcattcttttcttactactatatatgtaatcctatgcctcgtccaaaccatgaaacatcatgctatggagatacattaattccatgtgaggattagcccattattcagctggcatatagatgattgcttcattccatttaatggaatacaattatctaataacacattaaacactaattactaaaaggtggaatacgcgatgaatacttctgaaaagaaatgcacggattgcggaggcacgtctttcgtacaagcctcggacttcatcaatcttcgtccattggacaagaaaatggcactaggttcggaaagagtatttacggtttgtttagattgcggtgaggttgtttcaataaaagtaaagaatccagagaaattattataatcataagcaaacgatatacgatatgaagagcagcacactttattgaagacatgctgacgattatttttaatacattgagaaacacccctgctcacacttgtgagcaggggtgttttctcagattaaacaatcaacgatataaccttacctgcattcacatcaatcaggccatagtccgtaatcttcagcgcgggacttaccgcaagggagtgcgtgctaatcgacatgatcggattgtaatgcacgtacccaagagacaacatcgctgctctcagttccttcacttgatgggataccactgcaagtggttcttccgtcaaaatgccacctacgggaagttccagatgggacagcaccttgccgtcttccaccacacagaagccaccctggctcgaaatcactgtgttagctgccaatatcatatcttcacgattacgtcctacaaccagcaggttgtgattgtcatgtgaatatgtcgttgcaatagcaccacgcttgatggtgtctccaccgatcagaccatgtgcacgattgccgttcacaccataacgttcaaaggtagcgatttgtgcatatccgctttcttcccataacaattcgccatccgcagactgaaccggtgcaatatgttcttctacaaaagtagaaccatccttcaccatcatgacgcggcattggtgctcaccttcgccagcgagatcaacacctgatccactgacttttgggtctgacaactgaattgcaaaatctgttacgcccagcttctccaactgtacactcttatagaagtgaggtgggaactgcccggttatgcgttcctgcttatacggttcgtaatcgtcataagctttgcggccgtttttgtacacctgatcaatagcgagctcctccaggttagataacaacacataatcggctactttgcctggggcaacgctgccacgatcggtcattttcatccgggaagcaggggttgatgttgctgcataaatcgcgtcttccggacgcatccccatctgaattgccttgcgtacgatatgatccagatgaccacgctccaccagtgaatccggcattacatcatctgttacgaagcagaaatgctgcgccacatcatgttgaatcaggtactccatgacttccggggtcattgatttctcttgaatttcaataaacatacctgccgcaatccgcgcctgtaatccctcaatgctctgatgagtatgatcggaatcaatacctgcgtagatcagtcgatgcagatcgagtccaagcagtttcggtgtatgtccttcgatcacaagatccggatagtttttgcgaatatgctgtaaaatctggtttgtcttgcactccggatcacggatgacatcgacatagttcatgatctcacccagacagatgatctcgccagtggcgagcaacacgtccatatcttcaatctcgattgaaccgcctgttgtctccatcggggttgccggaacggaacttgggatcgcatagaacatatccacggtggtgtcccgactcacagccatcatctcctgcacaccttccagcccaaatacattcgccatctcatgcggttccgcgacaatggacgttaccccgcagccaatcagaccatgagaaaaggtttccggtgtcaccatcgtactttcgatatgcagatggatatcgatcaagccaggaatcatgtatcttccccgcgcatcaatgacttcatctgcctgaatcaactcaggtccaccgggtccaacataaaggaatctgccgcccaacacagcgacgttgttcatttcaaaccgtttataataactgttatacacatgtacatttacaatcagttgatctgcacgcatggggcataatctccttcttcacaagcatttcaccatgatgcgaaccggacaatgaacctgcactttaatctgctgtactgcacatgactgcgcaccgctgccatcgtccgggaatcatcgcatgaaatgccttctttgttgctcttatttcttaatactgttccttacattcacgactactccaccagtacaagcttgtcctgtgggaagatcaggctaacacgttgcccgctaaggtatggtgtttccatctcctgatttgctgtaaagtcacccagttccgtctcgattacatactgataactgcgtcccagatacgtgctgaccttgataatccccggcaaggcgttcatcacattcgcagaggtatctccactaacgatcagatcatccggacgaattgcgcctttacgagcaccgggacgtgctgttccgggatgcgcagttgctgtaaatgtgcgtccacctgcgctcagtgtgattaattcacctgcatcactgcgctccgcgaattcaatgaaattatggaacccgatgaatcgtgctacaaactccgttgccggatatttgaaaatggtttccgggcggtcgagctgctcaaccacgcctttgttcataatcgctacctgatccgagatcgagaagcactcttcctggtcatgagagacatacagcgttgtgatgcccagctcttgctgaatgcggcgaatctccacccgcatgttgaggcgcaggttggcatccaggttactgagcggttcgtcgaacaagagcaggtcaggttcaatgaccaatgcacgagcaatggctacacgctgacgctgtccaccggacagttcttgtggaaaacgtttctcaaatccattcaggttaacgacttccaggattcgcatcacacgggaagagatatccttgtctttcaccttgcgcatccgcaggccaaaggccacgttgtcatagacagatagatgcgggaataacgcataactctgaaatacaaatccgaagttccgcttgttcgccggaaccttcgtataatccttgccgccgaacataaacttgccctgtgatgcttccagaaatccggcgatgaggcgcagcgtagttgttttgccgcaaccgctcggtccgagcagggagagcagtttacctttttccagctccaactgaaaatccttcaggattgtctgcttatcgtatgccacggatacgtggtctaatgtcagcaatgccatagcgttctgcgcctccaattaacgtttagtaaagtatgaaaatccgcccatgatccgttcgatcacgaacattaatagtccggtcagtaccatcaacagcacggaaatcgctgcaatcgttgggtcaaaataattctccacatacgtcagcatctggatcggtaatgtgcttacccctggtccggtcatgaacaccgagatgtccacgttgttgaaggactccaggaaggcaatcagcacggcagcgataattcctgagcggatgttaggaagcacgatcgtgaagaacgttcttacccgtcccgcaccaagactcagcgcagcttcttccactgcaaagtcaaagctcgacagactcgacgcgataacccgaatgataaatggaagcatgataatcgtatgaccgatcagcaatccgaggtacatcggcagatggtagattacgatcaggtatttcatcaatgtaaaaccaagcacgattcccgggatcagtaccggggacaggaacagtgcgttcagcacggacttgcctttgaaatcgtaacgactaagtgcatacgcagccggaactccgagcaccagtgccaacaagtttcccagtaaggaaatgatgatggacgtctggaatgtgcggaggaaaccgcctgtgttgaaaatattctcataccagcggaaggagaacccttccggcggaaatttgagtaccgttcccggttcaaacgaagtgaccgatatgatcagaagcgggcccagcagaaagataaagaccagcagactgaacaggcccagcccgatatgtttctcccgcatatgtctaccccttcggatttaaagttttggccattttgttcatgacaccgaccacgacaaatgtaattacaatcataatcgcggcaacaaccgaggccagataccagtcgttgagggtcatggcgttctgatacaggaacgtagcaattacacgttgcttgcctccaaggagggcaggtgtggtatacgccgtcaggcttccgacaaaaacaagcacggctccaatcacaagtcctggcacagccagcgggaacacgacccggcggaatgccgtaatgcgcgaggcgcccagactttgtgctgctttgagcaggtcaccgtcaatgttctccagcacgcccaccagagagataatcatcagtggcaggaacagatgcgtcagaccaatcatcatcgctgctggtgtatacagaatatccagcggcttgtccacgatacccagaccaacaagggtgttattgatcaaccctttgcgtccaagaatgatcatccagctaaacgagcgcacgaccgggctcgtcagcagtgggaagatcgccagtgctagcaaaatgcctttgcggcgcggcgctttctgcgagatataataagctgtcgggaatccgagcaccacacagacgatggtggtgaccacgctgacttgcagcgtcgtaagcaatattttcaaaaagtatgggtctctgaaaaaatgcatgtatccttcaaacgtgaaggagttttcttggaaaaacgtcgacccgatcgtcaggacaatcggaatgatcataaatgccgccaaaaacacgaatcccggcagcaatagccagtagattactgatttcttcatcgcgatactcctgacttttaaaatggttttattcacacgtttcactggcgcacatttcaaaaataaacgttcactcatcgcaccagccgttccggttacgaatcgttcttacgatcgctgttatccttggattttcttgatctccttcttagtagaaggaaaaatccaaggataaaggcgaacgcttcgcttcttcagaatcgatttcgtcccctacactaccagcgaaataggtgggttaattttagactgaactccaatgccgtgaagttcataactacgcgtttaatgcgttgataaacagttcaaggaatgcttccgcatctacagtttcgcagacgagggtgttgggctgctcgcccaaacggttttggaagtcacataccatctggccatcgcacaggcggctggcggtttcgacatcgacataatacgatttacgtcctaccagttccggggcaaggactacgcctacggctagtggatcatgtaaagcgcaagcgcggacgccgttcatttgttcgtaacggttgatgtaaatctccgtgctttgagcaacgtatgcgcgaagtgcaggatcagtgagacgctcaatcgttgcttcattcagcaatgtttgacgcgtcacatccaatccgacttgggtaagcttctcgatgcctgcgtgcagtacgatgcgtgcggcctctggatcagcgtaggtgttgtactcggcggttggtgtaatgttgccatgtccacgaactacgccacccatgaagatgacttccttcaataaagaaggcaattcaggacacttcatcagcgcgagtgccaggttcgttaagggtgcggtcatgattaatgtcagttcgcccggatattgcttggcttgttccacgataaagtctggcgcaaaaccttcctcggctttcttagacacggccggatcaggcagtgcaccgcccaatccgtcctgtccatgtacccggtgttcataatgcgacttgcgagtgagcggcccagctgctccggcaatgaccggaatttcaggtgcacccgcgagttcaagaattttgcatgtattctctgttgcctgctggagtgatacgttcccacagactgtggtgatgccgagaatgtccagcttccggcttttgacggccagcaaaatcgccagtgcatcgtcaatccccgtgtccacgtccagaatgatgcgattttgcgcttcactcatccgttctcaactcctatgcggtgatatggttgcttgctacaaatgatataagttaaacatgttgaccaaagataacttttaagtcagtcggttacttgtttattgtgcaatctcacggttccagcgatccgtccaacctttaacctgttgattcacgaattccatatccagcttgttcagcttttcaacaacttcagcgccgtatgttacgccttctgcttcttcagcagtcagttcaacctttgtgttaaccggggaatcgactttggctttggcagattttgcttgtacatcctggctcagctgccagttgatgaactcttcagcgagctctttgtttttgctgcccttcacgacattgattgtgttcatcacggcatatgcaccttcgctaggtgtaacaaactttgcattaggcacggctgctttcagatctttgaaatacatttccatgatcggtccgcccgcaatttcttcttgggagaacatgttcacgaactcggacgtttggctatagaatttcaccacattgccgctcagttttttcagttcagcaaatgccgcatcttcattaaacgtatcgttaccggctacacgggaagctgcatccacaaccattgggcctgctgttgccgtaatattcgggatggtcaggttaccttcgaacgccgggtcccacaggtcactccatgaagtcacttctttggatacaagatccgggttataagcgataccgagctgtccaaccgtgtaggctgggccataatcttcaccaagtggtgctttggcaatatcataaatgtcatttacatttggaattttggagcggtcgattttctcaaacagaccttcatcgataccttgctgtgcatagtaatcagacaggtagataacatcgacattggatgtaccttgacgaattttattcagacgttcagcgttattgccgacttcgagcacgatgtctacattatgttctttttcgaatggaccaaatacttcttcattaaagaaatcttcggagaagccccaagtggagataaccaatttgttcgctgcggttcccccactccctgatccgcctgttgcatcatccgtgctgctgccacaacctgcaagtaataccgatgtcattgccactgctgccaaaccgctaatccactttttcatcatgatcctgattccccctgatatatgtgatgtgtatgaaaaaacaaaaagaaaagtgctcttgtataaacaagaacacttttcttcgtaaacaaaggaaagcgacacccgctgccggtacatcatcggtttctgcttcagaatcaatccaaagacagacgccatcatatgaaattgtacggaacctgatcatgaatctgggccataacctccgtatgtgtcaacaagaattaatcctgccgaaccatccttaggcctgttccagaatcacattcgtgatcgcccactgagtggacgcatcataatcccgtaatatagcttcaattggcaaacccatgtgttgctcgagcttctcccggaatttcttcttatataagacagacatgcggaagtccacttccagctttaagccgggggcctccccttccagggcgtcagagcgcggtgaacgtcggtgcttcgcgtagaaggtcacaatattctggtcaatggtcactctcaggagagtggtgccaaatccgaacagttccttcgaaatttcgttataatactggcacatcttcttcttgctctcattgctgtccagtagttccatgaactcacccacatctcttactaccgtacattcgacgtgttaacacgattgattatacataaatatacgattataggcaacccaaaagatatagttaacatgagaataacacataaaagcgaacgatgagacattaacaactaaaaacaattcgtcttaaaccacagtgaatttacattaatatgcctgcatgtcattcctatactattgttgcttctatactccgttttcatacacaggattcgaggctttgtttcaactttccctaaatgggtactaattcctgcgaaacatagacaaacttcgtcattaaccgttaaaatgagacacaatgttgacatgtttttattttctagaaattggaggcttataccatgaaatgtccagtatgtaatcacgaaaatggagatgcccatttttgcgagaggtgcggctctaatctaacgcaaacaacctcatcaccaactcctgtaccgaactcggaatctgctgcttccgaacccgaatatacccgttggtccagcacgcaggccacctcttcccaggcatccgttccatccaacacaccatccgtctccattcacaaggaacaggcgagagaatcaacaggtaccaatgaccatgcttctgcaggagacaatagctccaatcagtggaataatattgtgcagaatgagaaagttcagcaagccaaagaagtaagcaaacagtatctatcctatttcctcagtgtattggcccgtccttatcagacgatgaaaaccgttggcgaccagcattccctaaacggatggctaacgatggcgctaattgcagttctatcttctacatacttcttaattacctttagtcgcataggcatggacggcttgttcattggtggatttttaagaccgctgttgttcaccgtcattatcctgattgcctctattgcactgatgtacgctattctgaagattgagaaaataaccttccgtcccaaaacactggttgcccagtttggtacattgcttgttcctgctgtcgtatcccttgttctggcgaatctgtttattatcatctcgtattccatcgcgatctcattgcttgctgtctcgtatatcattatctttgttgcgctgaactcggtgctgttccaatatccactgaatcgtacccaagcagccatcgacagcatgtacagcgtgctgatcgccaatgtggtcgtattctttattctgtatcgattgttgggtgagattatcattggactgattggcatgatgctttcgccttttggacgtctgtaaactatatcagttggaataaagctgtttacactcgttacttcgatgacagaacaaccttccgatcgctcttatctcattagatttgtattaaggctttccctgctcccgcggggaaggtctttttttggttttccaaggcagcattgcgctaggcatgtttcatacactataatgtgtagtgcaacatgtatgttcttatttacgtaacaaacacggaactagcaactcccgttacgtaatgagtggattcaccattgccaacaacactacattatgtagtgtattaaatactcattttacaaagaaagcagaggaactctctatggacatgactcatatgaatcatatgcaaatggagcacgaggcaggtacatcctacctgtggctcatcgtaggtgtaattgtattgctgttctccatcgccgcctatatctgggcatcacgcacacagggcaaaatcttgggccacatgaaaaagaaagagcgggcggacatccagaaaaaaagtcgatcccttcggctggctgcacatgtaatgatggcagtgtcgatcgttacgtttggcctgttcttcatgcaaggggcaggtaaaacatataatgtagccgatctggagtccaacgcgacaatcgacgtgactgacgataaatattatggggcagaccatacggaggaccccattcagtatgagatgacaattccaacatcgggaccacataatccacatgatatcaagtttggattttacaccgacttcccaggctataattatctggtacacaatctggagcacggggacatcatcatctattatcgtgagaacgcaagcgaggatttgaaggaacatctggaatacctcgccaaattccgcgaagccggagcaggtattctggctgtacccaacaaggatattcccgaaggcagtgaagtcgtggtgaccgcatggaccaaaacgatgaagctcgaccaattcgaagatgccaaagtaggtacttttatcaataaatatattaatcagggacctgaaaagattcctgcctctgttcgccagggcggcggaacgatgtaatgacgtaatcgcccagtcatgtgaagcccctctatgtagtgacaatgagatgtgttccaatgatgagcatggtcaatataggattgaaacaaaaccagctcccggatcaaattgactcgggagctaattctttatggaccggatgccgatatttcaagtagaaaactgtatatttgatatacaatacatacgaaccaaagaagaacgacaaacaccaagtaaagagacaaagagacgattgattcaacagatcaagggggaacacttttaccaatgaacagtttgtttatgaggatctttttatttttttcctgtctgatgctagccgcgggtgcggttcttggcattaccatgtaccgttcatcggcccaactggtcgagcaatccatggggatgcaggcacaggctgtgggtgaacgggcagctgcattaattgacacctctctgtatgcaccactcagtaccggacaggccgagactgcgtattacggcacattgcgtgagcagctcagtcagctgcgcgaggccaatggactcaagtatctgtacacccttggtacacgcgaagaaaatggaacaaatacatatttctacgttgtggatggggctgctgccgatgtggcagagaatgacttctccccttacggttccgcagaagagacccattatgaaggaatgctgcaagcttttgaacagaatgagcctattcggggcgaactcacacaggatgaatatggcgctaccattacagcatatgtgccgatccatggggctgacgggaaagtactaggattggtcggtgcggatctggactctactgcagtctatgaactgatgtcccgcaaccgtatgaccatgatctggacagccttggctattgttctgctgagtgtcttgctggtgtatggattcgcccattacttgacccgaccattggtgaagttgaagaagttaattacccaggtaggaaaaggcgatctgaccgtcaacgttgaacttagtcgcaaggacgaggtgggacagctcgcttccgagttcaaacatctggttacaggtacccgtgatgtcatgactggcatccgtcaaagctccgattctctgctacaagctgcagaaggagtatccaaacattcgcaggcaactgccgaagctagccagcgtattgccgagcatacgaatcatacggccaatggagctactgaacaggtggctcgtgcgggcgaagttacggtagccatggaagagattacacgcagcatgcagcatattgcgaattcttcctccatggttgcggatgtctcacaggaaacgaccaataacgcggtgcaaggtcaggccaacatcaacacggcgatggacagtatggacaaaattcatcaagcgaatgtgcagatggtggcctccacctctcagctggagcagtactcaggtaaaattgagtcggtggcacatctgatgaaaggcatcgcttcacagaccaatctgctcgcacttaatgcaagtattgaagcggctcgtgcaggagagtatggcagcgggtttgcggtggttgcctcagaggttcgcaagcttgcgggggaatcagagcaatcgtcccagcatgtaaccgaactgatcgccgagatgacacgccagactgccctgttgtcagaacatatgtctgccagcacatcagcagtccaatccggtctcgctgttgttcaggaggcaggccgttcattcacatccattcataccgggattgagacgatgaatgaacgtctgcacgaagtatccgcagcatccgagcagctgtctgccagtgcagaagaagtatccgcttccgtggaggatatggaacatatctcacgcgaatcctcttcgagcatccagaaggtgtcgcacgctaccggaagccagctgcaatccatggatgagatgagtgcatccgccgaatcgctgagggtattgtccagtgagttaaacggattgattggtcgatttaaaatatagcgggcagctagattactatatagttggactaaagaatattcacacttgccacttcgatgacagaacaaccttccgatcgctgttatcaatctatataaatcagcccaaaacaaaaagccgcacggcaggacgggatcatggggttcaaccccatatccagaccactgcctgcggctttattttttgttgtcctttaatgttggcaagccttacagctgcctgaattaatagcgctgcggagcagcttttttacccaaatccgtcatgtacgtaaagaacgcttccggatcggtatcatacaccagttgtactggacgtccgtctgcttgctccaccgtgcggccttggctaggaccatccgggatgacaatacagtttacggtttttttcttcacgatgtcctcgcgtccaacggaagccgttgtcagcacatcccacagatagtatgtggaatttgtctcactgtacaccagtggcggacaacctgcgtaacagttacccaagaagtcaacgccttcgaagcgacgctctgctgcccagcggttacgaacagctggagtcagaggtactttattggtgctttccagtgcaaccagatcgatctggatgccactttgccatacacggtaagccgcttccggatcccagaatacgttccactcagctgtgccgtcatgctcaggctcttctacgttaccacgctcgaatgtaccgcccatccataccagcttgtcgattttctcttcaatgtctggtgcttcgtccagtgcacgcgcaaggtcagtcagtgggcctgtgaacaggagcaacgttttgccttcggtattgcgcactttctcgatcagatgctggtgtgccggaacagcagagagtggagcttccattttgccggattcattcagtactggaagtgcatctacatagaaggaatgcagtctccacgccgcaggaaatggatttttccctctggagttggatttggatacctctacagaatatgtaccgaaacgatcgataattttacggctggcatctgttgctggctccagatatccgtctgccggaataaccgatacgccggttacatgtacattgtccatttgcagaagcatgaacagcgatacgaggtcatccacgccgccgtcatggttaaaatacacattaagttggttcgtcatgcttgctttcatccttcccctggttgtcccattgatgttgatcatccgtctgcccaaggccgacgctctctctattatgtcccataacccttggttacgtaaaccttccccatgcaaagaaaacaaggatcacgcctcatcctgcggatattttacagttccaccattccatctcaggaggacaactggtagaggtcatcatcgttcggaaaataaagaaatggacagcaggcttgaagccccgccgtccatctcacccattccatgcattacatggaatggttctgtttctcttcattcttctctgcaatcggcacatacttgcctggccagaaggcccatttgcccagcaatgcggtggtcgccggtaccatgaacgggcgaaccaggaaggtatccagcatcacaccaacggctgtgattataccaaactgcaccaacacctgaattggcaatgtagcaagtaccgcaaacgttcctgccaagattagacctgcagatgtaataacagagcttgtctcgccaacaccttctctaatcgcttgacgaagcggcatcgttttgcgtttctgccagatgctagagatcatgaagatgttgtagtcttcacccagtgccacgaggaatacaaaggaatacagcggaatcgctccctgaatggcatctgcgccaagtccgtagtgaatgatgatccaacccagacccagtgcagagaaatacgacagaacaaccgttgcaatcagatacgccgtagctacaactgaacgcaagtataatagcaataacaatgtaatcatgccgatgaccaccggaataatgatcttggcatcccgttctccggttacttcaatgtcatactgttcagccgtctgaccatcgatccatacctgactgtccacattagctacaccagcatcttgaagcgcctgttccgcagtagcccgcagatctggaatatgctgcattgcctccatggaatatggattcagattaaattccacatcaaaggcggtaatgttggcattctcggcaccctgctgagcatcgcctactttactaatgtaatccagcgattcgagccgctgcttcagatcagtttctttgccttcggcatcaacgatcactttgactggagccagctcaccttgggagaattgttcgccgatgacggtgaagccttcgcgggaaggcacatcctctgggaatgaagacaacagatcatacgtgaatttaacctgagtagaaaatgccgccagtcctcccagcaataccaacgtaattgcaagaacggtccatggcttcgttactacaacacggccaatccagctttccttcactttgcgcggggcaggagccggttttcctttcttcttcgcacgttccacttccatctcatgtgtacgtggtacgaacggatagaatgaaccccgaccgaagatcgcgaggagcgccggaaccagtgtcagacttgcaataaacatgataaagatggacagactgaatggtacggcaaagcgatgatatgcaccgtattcagccagcaacagtaccagtagtgctgcaacgaccgtgaatccactcatggcaatggcgccagatgatccggtaattgcctggaaaatggctttctttttgtccggctcatgatagagaatctggcggtatctggagatcatgaacaggcagtaatccgttcctgctccaaataacaacacggtcatgatcgaaatggactgtgcatccaccgtaatccagccctgatccgccataaatccgagaatggggcttgtcaccatatacgcgaatccaacggcaatgatcgggataatcgccaataccggcgagcggtagatcaacagcaacagtactaataccagtacaaccgtagcgatcagcaaggatacatcggcggaagagaatagcccgctcgcatcaatggatatccctactggccctgtcacacgggcaatcagtgtattggtatcatctatagctacatcgaacggatttgccccgaagatgtcttgtgttttttgctcaagtgcttcaatagcttccttcaattgttctgaatcggcaccttcattgaagaaaagtggcataaccaaagtacttccgtcttccgaaagctggcctttcaatgcctgtggtgtcaattgatagagtggcacaacggactgttgttgttctaccggatcttgatccagtcgctccgttaatgcctgaatgttctcaatctgctcatccgtcagaccgccggcttgacgccatacgatcagcgcgggcaatccttcaccaccagggaattccttctcggcaagtgcagctgcctgaaccgatggtttagattcactcagatcctgtgcgttattggtttcacgatcacctacagcaggccataccatgccaagcacaacggcgataatgatccatatcaacagcgtaatccatttgcttcgtttgccggcaacccagcggccgtaacccgaaccttcctgcattgtctcttcatctccctattctgtttctatgaagccctaatatatatgatggtgtagtaatgaaccacgggtcatagtataatcgagttaattatatataccggaaggttaattttgcaatgcctaattttgtgaacacttctaacaagcaattaaatacgtaaagaggtatgtacttatgagcaaaaaaacaaacattccccgttcaccgggtagacccaaaactggtgtggatcaagcatctgtgcaatcaaacatattgatgaccgcgtcacgtctatttatggaatacgggtatgaacccgtctctctccagcagatcgcttcgttatgtaatgtgaccaaagcatcaatctattatcatttcaccagcaaagccgacctgttcaccgttgccatcacccgcatgatggcgatgggcatgcagcagacttcgctccgtctggatgaacctggtacgttgcaagaacgactggttaaggttgctgaagcgaagatgcagcattcccatattgaaacggagaccatgatgcgagaagccgagaaacatctggacacggagcaactcgctcagattcgggaagcagaggttcgcatattcgaagtactagctacccattttcagaaggagatggataatggttatttgcgggtcgggaaccctatgctgcttgcccatgcatttacgtcactgctgatgctcgcaaaccgcgaagatgtacgcaacatgaatggcggcagcattgaggaactcgcgcaggaactggtggcgctatttctggatggagcggttaagcggaactaaaatatatagctgtatctcaaaagcagttatgtcaaaaaaaccatcgggcgatgtaatgaacacacctaccgatggtttattggttgaaatctaatcatgattataggactctgctcctgaaaattttgaattgattctgtaattacttacctgttacttagtcaacagtgatataaatagatatattaggtccatcactactattctccgtatagaatttaccttcacccgttggtcttccgtttttaaacatgcccacatagactaacttaccgtttaagtaccctttacctttgccggtaatggctccatttttagcctgcccatcatagatgattacaccatcttcgtacaatttaattttgccagaatacgtgggtactcctttatcaaatgcaccaacataggcaatttctccatattgatatgctttaccttgtccctgtggcaaaccattcttaaacgtaccctgatagaacatttcaccatattctgtataccacttaccttgaccatgaaacgaaccattcaaaaaatcgcccttatatttaaccgttccatctggataatattcgatacccttacctgaaggaagccatgtttccttatccaccttaccaacataattaaactttccatttgggtaataagtctttccctgtccattagaaatatccgagtacagctttccatctgcgttatacctttttccttcatgaggcattcccgctacaaacttaccttcaaagctcttcttcccatttggaaagtaggatattcctttaccattaggaacaccatttttgacttctcccacatatctgtgtttctcaccagaaagagtaatatagatttcttttttcgctgctaagacctgtccaggtgaagtaaacagcggtgtaaccaaaattaaaaaaacagtaaaccacttcaaacaattctctaactttcgcatttcgttaaatccccatttctattcttatagaatctatcgtcctgctaaggtaaactgatacgtctctttaagactatgaatgtctggtttactacaacgcagctatgtatacagtacagcaaatcaaaatatgtaattcgagcagagtaatacgaatcttcaaactaggtttctcttcgacttagcaagcacgacaatacttatatcgaccattatagctacaagcatgagaaaatatggtagagtgttgttaattatctatttcccgttgattaatacgatacataacatgaataatactagcctggaaactataggaggaaataaccatgtcacattcaaaaccttcctcacgtatcccacgtctgctggaaacgtcgcgcatatatctgcgtcccttcgagattacagatgtggatgcatacttccccggtctgtttgacgccgagatgcgtaggctgacgggaacacagaacagtttcacacgtgctcaggttgaacgttatgttgagagcgctgcacaagatgacaccagactcatgctacttattgctttgcaggaaaatgaccagatcatcggagatgtcgtcctgatggacatgcatgccaagaatcgcagtgcacatatccgggttgccatcgatcaggcggagcatcaaggaaaaggttacggtagcgaggcgttgctacttatgctggactacggcttcggaatctgtaacctgcatcgaatcgagcttgaggtgtacgccttcaacgagcgagccattcgcacttatgagaagcttggattccagcgcgagggtgtgaagcgggatgtcttgttctacaatcatcaataccatgatgccattcagatgagcatgctggaggatgagttcaggcaacgtcatatgagagatcagccagagaatgtttaagttttcgatcagctaaaatcaaaccaaaaaaccgggggatttaataaccctccccggttagaaacttcagatgacccgtcagcaccgaaagctcggcgggtgtcttcatatacaattcgccatccgtgtcagctgacatcggcgcatccgtcttgacttttaacgtagatgccttgaagtatgaaatgctctcactctgaggttgccattctccctctggcttgtgcgacagaatctctcgcagcagcggaatgcctgtctcatgaataatgagcacgtccagttcgccatcctgcaacgcatccggtgcaaagggtaatgcattcgttcctagaaaacgaccgttggctgcatagatcatcaccgcttcgccttccatctctttcccatccgcctccagttggtaacgaaatggctctgtatgactaattgtctgtaaagtgctgataaaataactgagcttccccagcgcgcctttcagattctcgttaatattctgcgaagcatcactgatcaagccaatgccaaaaaagttcgtgaacacccgatcattagctcgtccaacatcaatggataccacccgacccgccagcatttcttgtgccgcaatctctgcatccggtgaaatcccgagtgaacgggcaaagtcattacaggtgcctccaggcaatataccaatcaacggaggatgttgcagatcagccagtccattcacgcattcatgcaccgtgccatccccacccaggataaacaccacatcgaattgctccccgcgttcacgacacaacttctctccttcaccagcttcatccgtacgcacaatgacgagttcatggacagcgggagccagcacaccagccacaaggcccactgtattctcacgattggccttgcccgaatgatgatgatgaattaacaatgctttgttaaactccatccctcttcctccattccgatgcttgttaacctttacccacaaaggttgaagctgtaaacaagcccttcgctaagtactcatcatgattccaaataggtttcccaatcaggtatgcatcctaatcctcattcattcgtaatagctatataagttcaacttaagtatattcacacttgccactccgatgccagaataaccttccgatcgctgttatccccagatttttctgatttacttttacaaaggtgaaaatctggtgataagcgtatgcttccgatgtagctttctttcagaaagcttttaggccaacacttcgcttcttcaggttatttctgtcctctacgttctcgtgtaaatgtatagttaaacttaaatagataacccttttatctaactagccaattccttgtttaaccagatgtatgcatggaaaaaagggtttctccgcaccttaatgtcataaggctgcaaattttgctggtgagaacccattcaaattgagtcaaaacggttatatctataccatatacgaatggagggattccctatgattccggcaacgttggaacaattggagcaagttcgcaaggaatgccgtaccatggttcgcaaaagagctaccgcttctgccggtacaacactcgttccgctgcccggtacagacgtactggctgatgtggggatgctgatgcagctgttgcctgccattaacaataaattcggattatcacaaaaacagctggacggcatggaccccgagaccaaatccatgatctatggattcgtgatgtccatcggaagcaaagtcattggtcgtatgatcaccaaggaattggtggtacaggttctgaaaagagtcggcgtacgcgtagccaccaaatccgtcgccaaatttgttccttttgcaggacagggattggctgccgcactcagcttcacagccatgcgctatgtaggtaacaaacatgtagatgactgttatgaggttgtcaaacgcatgattgagcagcgcgaattaatcccgggcgaacccgctccgtctgcgctggaggaagctaacagcgacgacgtgaaggcagaagtaaggtcggtctcgagcaatgacactgatgaacctgcgaacgattctaaggatcagtaaaatgcgggtcatgctatgcccaaactgaggcttacaaagtatcttatgactaatctggatgtcccactcggtgagcttatgctcgtatgcttgtatctagattgatgtacaatgaattcagaatataaataaacgggacaaagcagtgtagttacaccgcttcgtcccgtttttatttttgcacgcatggcatatgtaagacaattatgactaaggtttattagaatattttaacgaactcagcacactctaataggcacaattccacaattccggcgttctaacgaatcatagacactttatttccgcattctgcagtttattttaccgctttgtgttgcttatcagagaaataacatgtctcaagttcgttagaattgggagtgcttgataatcctccatataaggtgtctacgattcgttagcatggacgaaggatgaaccctcatcctgtctgcacctcacgcaaacaactgaaagactgacgagcaccacaacccaattactatgccaacgttccttcataccttatagatccatcgtatccaaacgaacacattagaatcgactcctctggatacacgacaaatagccgggagcacccctaagagtgctcccggctattctagttagttacagtgtaatcagatcgcctgcggttgttgctccgcaaactgactattgtacagatccgcatagaagccctgacttgccatcaattcatcatgattaccctgttcaatcacgttaccatgatccataaccaggatcagatcggcgccgcgaatggtagacaaacggtgtgcaatgacaaagctcgtgcgatccttcatcagatcattcattgctttctggataaatacttcggtccgtgtatccacgctactcgtcgcttcatccagaatgaggatggccgggttcgccagaatcgctcttgcaatggtcagcaactgtttctgcccttgagagatgttcgacgcctcttcattcagcaccgtatcataaccatcaggcagtgtacggataaagtgatccgcatgtgccgcaacggctgccttaattacatcgtcttccgtagaaccttctcgaccataggcgatgttgtcccgaatcgttccgttgaacaaccaggtatcctgaagcaccatgccgaacagactgcgcagcttaccacgctccatgtccttaatgtctgcaccgtcaatcgtaatccgaccatcctgaatttcgtagaaacgcattaataggttgatcagggtggttttaccggctcccgttggtccaacaatggctaccgtctgtcccggttttacatcaatattcatgttatgaatgagcagttcattttctttatatccaaaattaacaccttggaatgcaaccgcacctttaggctgctgtagttgcacgggttgtttggactccggaacttcttcctcttcatccagcaactcgaatactcgttctgccgaagcaatcgttgattgaatgatattggagatatttgcaatctggttaatcggttgtgtgaattgacgggagtactgtgtgaaggccagaatatccccgatagagatcgatccgcgtgtaacaaaaatcccaccaaccacacagatcagcacataacccaagttacctacgaaactcatgagcggcataataatacccgagataaactgggctttccagccggattcatacagttcttcattgaccttctcaaattgctgtacggattgttcttcgcgtccaaatgctttgacgaccttgtgtcccgtgtacatctcttcgacatgaccattcagttccccaagggatttctgttgacccgcaaagtgtttttgcgaacgagatgcaaccagcatgacaacaactacactgagtggcaacgtcaaaatcgtgatcagcgtcatccatggactaatcgtcagcatcatgataattacgccgacaattgtgacgatggacgtaatgaactgtgccaaactttgctgaagtgtattactgatattgtccacgtcattcgtggcacggctaagtgtctccccagttgtgcgggagtcaaaatatttcaaaggaagacgtccaaccttcgcactgatctgctcacgcatgtcatacacaacacgttgggccacaccggccatcaggtattgctgaacatacataaatgcagcactgaatagatagagtccgccaagcaggtataacactttcatcaatgcaggaaaatcaatcccggctccctgtacaccctgaaggatggcaatggcgcctttactgagaatatccgttccttcggccataacttttggactgatgatgctgaatacggtactcaaaatggctgcaaccagcacacctagcagacgagaactatggggctggagataacgaatcaagcgacgcagtgtgcctttgaaatcttttgctttctcagcgggaggtcgcatgcccattccgggacctggacccggcccaccatggggacgaggcgacttacgttctgtacgttcactcatgcgatctcctcctctgtcagctgggaggatacaatctcgcgatacacttcattgtgctccagcagctctttatgtgttcctgaaccgacaattcggccctcatccataaccagaatgcgatctgcatccattactgtacttacgcgttgcgcaacaatcagcacagccgcttctgtcgtttcggacttcagcgcagcacgaagtttagcatccgttttgaaatcgagagcagagaaactgtcatcaaagatataaacttccggacggcgaacaagtgcgcgagcgatggacagacgttgcttttgtccaccagatacgttgttaccaccttgtgcgataaggctgtcatatccctctttcatctcggtaatgaagttctccgcctgagccgtgcgggccgcatgaacaacttcatccattgtggcatcatctttcccgtgacgaatattctccgtaatcgtacccgtaaagaggactgctttttgtggtacaaagccaattttggcacgcagatcttcctgccgaatttcacgcacatccgtaccatttacccgaacactgccttcggtcacatcataaaatcgtggaataaggctgagcaatgtcgatttcccagaacccgtaccaccgataatggctgttgtctcacctgagcgagctgtgaaggagatattggacaaagctggattctctgcgcccggataacggaaagttacattatcaaactcaatcataccctgcatggatttcataccacgaggctgctcgggattgctaagatccggctgcatatcaagtacttcgttgatccgttctgccgatgctgaagctcttggaatcatgacaaagatcatcgaaaccataatcagtgagaacatgatctgcattgcatattggatgaaggcaatcaatgcaccgatgttcatattaccagtgtcgatccgcattccaccaaaataaaggatggcaatcatcgaaaagttcataaccagcatcatcacaggcatgatggtcgccatgagcacattaactttgatcgatgaatctctcagttctgtattggccccgttaaagcgcactttctcatgctccccacggttaaaggaacgaacaacccgaatccctgttaactgctcacgtagcaccagattgagtcggtccagctttttctgaatggttttgaacaaaggtaaacccttggcaccaatcagcgcaatagctccaccgagtaccggaagcacgaccaggaaaatcgtagataatttggcgtcctgagataccgccatgaagatacccccgatacacatgagcggagccataatcatcatgcgcagcatcatcgtaagtacattctgtacctgcgtgatgtcattcgtcgtacgcgtaatcagtgaagcagtccccatcttatcgaactcctggagcgagaaattctccacatggcggaatactctgctacgcagttgtttggcaaatccacccgctgttctagatgagagataactggcgatcaccgaacacgctgttccgccaatcgcgatgaccaacatccatccaccaatctgccagatatacggaatatcccctttaatgatgccgtaattcacaatatctgccattaacgtgggcaagtacaattcagcaagcgactgaaacagtaccaacaccagaataaaaataatcggaatttggtatggcttcagcatgcgaaacagtttcatcatggcttatcatctcctcttgtcgaatcatccttttgtaaggaagttaatgtatcaaaaaaggtgtatacctttgtcaacaactcagccagctgagtactgtcttgctcacccaaatgctcaactaacttattgaatatttccatgcgttcttggtgagcagcccgaataatttcacgacctgcttcagtaatcgtgatgcggacagcacggcgatcctccgggtccatcgtccgtttgaccagcccctcatcttcaaggccacgaataacaggtgtaatggtcggtgacttcactcgtagcaatgcgctgatttccgagactttcatcccggggtgattggattcgatcgtgtcattgaaatcaggcggattgtcctgccagttcaattgttctcccggatgcatcccgtggagtaaacaacccagcaccataatttcattgtgattgcgcccatgaggtttatgttgcctccatttgcctttattaaactgcataatggagtacaaaagcttctgagcgaccggatctataccagtcataatgggtccctccttctttctttatcattccatagacatccaacatcataggacatctattaaatagtagtacaattaaatagatgcacaattaattaggtgtactaagtatattatcgtaagaagccaatgtcaaacatctaaaaataaccaatataaatccataaccaagagcctacacgcgcttgattatgagttttgtcatttgacctccattggagcccgctatacttattatgtgcaattccatgaattcaacttacaaagaaactcccattctatactccggtggatgatgacccgggagtaagaaatgggagcatttttattacgattgaaaattagaaaccagagaatctccttaatcgcataacatgaacatgattaggtacgtttgttaatcatcaggactgtgaagcagagactgttttaagcactgaggcaaacgggaaatattcttttgcattgttgtaggcaatgccctgtacgatctgaccgagcaactccatatcctgcggtgcctccccttgttcggcccattcaccgatgaggttgcagaccagacgacggaaatactcatgccgggtgtaggacaggaagctgcgtgaatcggtcagcatgccgacaaatcggctgagcagaccaacattcgctagggctttcatctgagcgagcatgccatccttcgtatcattgaaccaccaggcggcaccaagctggattttgcctggaatacccccgccctggaagctgccgatgatcgccgcgagcacttcgttgtcccttggattcagagaatacagaatcgttttgggcagtgcttgttgttgctccaacgcgtcgagcaatccaatcatcgctgcggaaagcggcgtatcattcacggcatcgtaaccagtatccggcccaagtttggcaaacatccgtgtgttgttgttacgggctgcattaatgtggaactgcatcacccagccccgatctgcatacagtttgccaaggaacgtcagcgttaccgtcttgtacttgtcctcttcctcacgagttaccttctgacccgcaagtacctttgcaaagatggcagctgcttcttcgcgtgtagccacgccgtaaggaacataatcaagtgcatggtcagagactctgccgccgacggaatggaaaaattccacacgtgactccagcgcagcaaggaaggattcataatctgaaatggcagtgccagatgcctgcgacagcttgcccacccattccacgaaggtatcccggttcaattccaagcctttatccgggcggaaagaaggtaataccgccgtatcaaagccttcgatttcctgaattttcagatgatactccagagaatccgttggatcatcggttgtgcacacaacagtgacattggatttggtaatcagatcgcgtgcaccgaatccgtcactgttcagtttggcatttactttttcccagatggccggtgcgcttgtctcattcaatacttcgtagacgccgaaatatcgctgtaattccagatgagaccaggcgtacagtggattaccaatcatcatcggtaccgttttggcataagccatgaaacgatcgtaatcggttactccctcgccgccggtcacatattgctcttcaattccgtttgcgcgcatgagccgccacttatagtgatcaccgtataaccaagcctctgtaagattgccaaaggttttgttctcgtagatctcctgaggactgaggtggcaatgataatcaataatgggcatgtctttggcataatcctcatataacttgatcgccgtttcattgtgcagcaaaaattgttcatccagaaaagatttcattcgcctcgcacgctccctttaggtgagtttacgttcatatgggttcacttcccatctttacgctacactgtttatcatcaaagttcaatataaaatgatagcgttatcaaaaaaggttgatttaggcatatattcgggaacaaggtatactggatttaacgcaaggatgctgatctgaagatcacacaaggagatgaaatgaattgaaaatcacttttctcggcactggagatatgttcagcgtggagcagcaccacaatagtatgttggctgaattcggagacacgcatctggtcattgattttccagaatcaaatgctaaagcactcaaggaatatggattcgccatgaccgatatccacaacgtgttcattactcatttgcatgaagatcatattaacggtgtacaaatgctgggttattacgcacagatcgtaggcgatcgcaaacctcgtctgttcatccacgaacaattggtagatccgctctggaacattctatcccccggcatgcgctacacaacggatggtgaacgtaccatgagcgattactacgatgtcgttcccctgccagatggaggcacattcgaactgggcggcgtgacgttcgagacgtttcggacccaacatgttcccggtatggtcagcaatggacttctcgccaaaccttacttctattacagtgcagacagtacactggaccaggcacgggtggagcaagttgccgctgatgtgcagctgattttccatgaatgtcatatgcacgatctggtcatcaaatcccatacttcattgaaggatctggagcagttacccgcggaagtgagacagaaaaccgtactgatgcattatcatgacgagtacgcggatgcggacaaacggaaacaattcaaccgcgagtatgatctgcggatggttggcacgttggaatcatttgaactggagtaggtaaacggaaagagggcatcggatattatcttatttgatctatattctaatggaggtcattgctatggaatatcgaattgaacaaggttactttctgatatattctcctgcaagaagcaccagtagtggagacatcatggtggttaaattactggaaagaccctttaaggatagagttgaattcctcattaacagcaaaaactatcagtgtactacacaccatgaatacttaaactttgagccaacttctcatcataaacctgagaagcctggagcattttcaatggaacgaagtgagttcaatcgaatgtgggatacgatgaatcagtattttgaaaagtaataaccttactatctcaaatagataaccggcagcgtctactcagattcctcatacggaactggcggatgttgcctttctattaatctaatctctctccaatgacttcatatactcaatcgtccttggagacggctcggcctgaacatgaaaataatcttccgttcgctgatcatttgggccataggaaattttgatatacatatctgcataatgctggaggatattgctgtcgatctccgcctttggtttcaagacataacttctgctcagactcaatccaagcggttccttgtcagactctaaactaatctcgtgtgtattgctcacattggaatgaaataactctccggcatctattcgatttatcatgttgggatcgagggtgaaggactgaatgacattaaccatgggcacccgagcctcattcaccaaaatctcataagtaatccgatcaactccggatgcatgactcacatccaccgttgctgtcaaattataatcatctggcgagttcgtctgaaaagactcaaggttcttcgtaacccgctcattcaaatctcttcgctccgaattcaacgtatactcatcggttcgcttcggttcacccgttggcccctggtttggtcccaaactgcaagcccccagacacacggctattacacataggtacatgaccaacgggaagaaacggttcatctctcttttgggactcatgccgcccctcctcttctccatcttctgcaaaaaatatcgcttattacgttctctcattttgttttctaacactccatatttggattattgtaccatgtattaagatgtggaaccgaactgtttctttctcatttcatgtttttaattgtagcagtgattcgtttgcgtatggcggcgacacttaacccacgtgaagctaacgaatctgagaggccttattcggctgaaatccgagttaccagtattctaacgaatctcaaacgcgttaatcaggtgatgttgctccaattggcgctatttcaatcgttttgagagtaataaggttactgagattcgttagaattccaataacgctaattcagtgcaaataaggtgccctcggttcgttaggatggagttttagttgtacctagataaatgcaaaaaaaccacctggacacaggtatactcgctctcctgttcagatggtttaacgatctatctatatactattttcatatcaatcggtgtaccttttcttatcctgcctggcacatgccgttactcagcgtcagcgcagtcctcattctgctctggaagagcccataccgacacgcctccaccgcaaacatggaaggtggcccagccgtcttcctcaatggtaatctgatcatcacagctcttcgtcagatccacccagacttcaccagcacgatgctctccgatgaacatcctcttctcaccgtcatccccgttggagatgaccactgcacaaccggaaccttcgatttcctctacgcctcgacgtacccaaccaatcgtattggcgtgatcgaagtaatcttcctgctctccatatgccttgttgcaacgggctgacagcagaatgtccagaatttcttttttgccatccacaggttcaggtccaccaatgccataataatccccgtaaaatacaaccggataaccatcgcggcgtaatagcgtcaacgcataagcactgggtttaaaccagtcaccaatccatgattccaacgcttcatgaggttgggagtcatgattatctacaaaagttaccgcatgggtaggatgggtctgcaccaaggtgtcatcaaaaattttggaaagatcaaagtctctgcctttaagcgaagcctcatgcaacttgtagtgaagagacacatcaaacaggtcgatctgatagtctaccgtatcaaggaattcacgacatgcatccaggttcgagttccagaactcacctacgatgtagaaatcctgaccgcgtttgcggatcatctctgctgcgaattccttaatgaattcatggttgatatgcttaatcgcatccagccggaacccaccacactggagggtatcgatcagccatttcccccaatcgatcatctcgcgccgaacatccgggtggttataatctatattggcgaacatcagatagtcatagttgccgaactcatcatcgacattctcattccattttttattctctcctgcgatgcggaatacacctgttcgttctcccgtggcatcaaagtccgtgccgttgaagtgttcagagttccatttaaaagaggagtgttgatccccgcgacccgggaatgtgaatttggtccagccctcaatttcgaacggctcagaaatttccttcgttcgatcattgggatcaacctcaatcactttaaaaacttccgtctcatctgccccagccttgtggttcatgaccagatccacatagacggcaatgccgttcttctgacactcagcaatggcctccaccagttcctgcttggtgccatatttggtccgtacggtacccttttgatcaaattcgcccagatcgtacagatcatatacaccataacctgtatcttctgctgacactgccttggttacgggtggcacccataccgagtcaatgcctttggctttcagttccggggccatttcagccagtcgcttccaatgatctccgtctgcagccaggtgccattcaaaaaactgcatcatggtatgatttctcttcattataaccgacctccttgattgctttcgaagcggaccgcggaacggatagggtaatcgccgttgttcgttcgttgctaaccaagttataaccctttcaccctacccttcaatcatataaaggaaagaaaatcaaaaaaatatatgttgtataagcttaacaaagattatttacactgacactacgatgacagaataaccttccaatcgctgttatccccagattttttgattccctttttcgaaggggaaaatccgaggataaaggcgaacgcttcgctttttcaggttttttctgtcctctccgttatcgtgtaaatgattagttcaacttatatacatgcatcatttcattcgtagttctttcatcaaattcgtttatagtcccgccactcctctggcagcagggaacgataaggttcttggataaaccgatcgtcgaccagcaccagcacacccctgtcttcctctgtccgaatcagccgtccacccgcctgcagcaccttgttcataccggggaaaatataggcataattgaatccgttgcgtcctgtccgatcatagtaatcacgtaatacgttgttctccagaccaatctgcggcagccccgcacctaccacaacgacgccattcaagcggtctcccggcagatcgacaccctcagagaatacgccacccatgacggcaaataccaagcgtgttcgttcaggattgggttggaaaccatccaaaaactgctcccgttccagttcgttcatgccttgcttttgtataaccgtatccgcttcacttggaagctgtgcataggtctcatatatctcgcgcatataagggtaggaagggaagaagaccatcagattgctgcgcggccattcacttaccagctgttgcagcatctctgcaatggggcgccgggattgctcccggtccttatatcgcacagataagggcagaagccttacatccagttgttcacgctgaaatggcgatggaatctgcaatgtataatcctcttcctctgcacccagcatatcccgaaaatagcgaaggggtgacaatgtagctgagaaatgaatgagcgagcggaatcctttggccgtctgacgaagcagtaccgaaggatcgagacaaaataactttactctcacttcacttcgaacacactctgcatacgtaataaaacgttcatcatacagcttggcaatacgcaggaaattctgtgccgtgaagtaggcatccaacagcagctgatccgtctcggcattccccgagccaccttcaacaaggcattgctccgcgaccatgacaaaaggctccagccgttcaatcagttcctccggtgcttcctgctggatgatctttccttcttctccaccgtttttccgaagggtaatcagatacttatcaatggccccggtgtagtcaacaatggctttggcagcaggcacactgctgtccagcgactggaactctcttttcacatccagaaatactgccttctccagctcagcggaaaacatcattcggccacgatcgaccagattatgagcctcgtccaccagtaacaccgtcttgcgtttctgctcctccaacattcttttcagagagatacgcggatcgaaaatatagttataatcgcagatcaccgcatcggctgcatacgctgcatccagtgaaaactcaaacggacacacccgatgtttgcgcgcatactgctcgatgaccggacgtgtcatcaacgtctcatgttccagcatgtccagcacggccccgttaatacggtcataatatccttcacacatgccgcattgccccgtatcacaagcttcctcttctttaaaacaaatcttgtccttcgcggtcagactgatcacatgcatcttcaatccttccgattgcatccgggcaaaagcttcttctgccgccacccgtgtcgttgtcctcgcggtcagatagaacaatcggctggcttcgccttcgccaatcgctttgaccgtgggaaacagcacggacatcgttttaccaatgcctgttggtgctttggccatcaatccctgaccctcacggattgttttgtaaacggctcctgccagcttccgctgtccctcccggtatttgcgaaaaggaaacggcagctctttcacactgatatcacgcttttcttcatatgcagcgatcatctctgcatatggcgcataaccggcaatcacttctgccgcaaactgctccagttcctgtcgttctgccattcggcgaaaccgtctttcttcatgggtaaccgaatgcacatacgtcaactgaacttgcatacgtggttcgtcttgctgaacggcgtacatgtaggcatacatcatggcctgcgcccaatgcacgggaagcccctcacccagatcatccagattgcccgcagttgatttgatctcatccaccgtcaactgaccctccaaccggatcaggccatcacatcgtccctccaccacataggtcagatccccatgtcgaatctcagcttcgagcacaatctctttcagatcctcttccgtgtactccttctgtacccgctgatgaattcgagttccctcctgcatcgaggcattggtccggaaccctggacgtatgctgccactgcggtacacatactccaccaaaggtctaaccgatatccgaattgttgttgtcatacgatcacccgttctgtttgtagtgattatactttatcatgaaatatgcttttggacacagcaccacctcgaagaagtggaaaatattataaagagagattgacattccatcgtcgcataagtaaagttaactttacgtaaagcgaactttacttatgggaggatatacttgcaaaatctaatcagagacaaacgaatacatatgcacatcacacaggaagaactgtctcaacggctaaaggtctccaggcagaccatcatatcgttggaatccggaaagtacaaaccttctcttgtgcttgctcacaagcttgcccaattatttggctgtcagatcgaggaattatttatttttgaaggagatgagaatattgagttctgaattactgaatcggatgatcgggatcggtggaattgtagctggtttgttatttgcaatactcattatttttttcacaaggttgattgcaaaaaagcacaacggactggatgagcggtacctctattgtatcacgagagcaaaagccttctcctggaatgcgaccactatcagtcttgctctggcatggatcctcgtagttgtgttagacggaatatcgctttcctttttcattattactgcagtgtttgtcattcattgtttatcttctattgcggcaaacctatactactcagctcggaattagcccacctgtccgatacatgtgaaccgattggactcgcacaatcccatatgctatcttgaaatagaatgtacttaatgaggaggcagcttctatgtatatctatttggttccttcaccgattccggatgcacttgctgcatacccgcatctgactttgcgaagcgaagagcacgtgcgtctggctattgaatccgcagaacgcctgatgaatattgagtctgatgataaagtagccgcatatgaagcttttgatgccgcaggctcctggactggcggtggttacgctgttctcaacaatatccctgtcacagaggatggtcgtaacgattttgaagaacggtttaagaaccgtgcccgcaaggtagaagacgagcctggctttgtcggtattcgtgtgcttcgtcctctgaaggatgacacgtatgtcgtacttacactctggcagtcggaagaaaacttcaaaggctggcaggaatcccaagcatatagtcacgctcatcgcaaccgcagtgcaagcgaagggctgaccgcacagaagcccaccatgttccccagaccttcttacgtcacaacgtacactatagaataacgaaattgggtcgcatctggcttttatcgcagtggcccatgttttttcaaacctcttcctgcatggaagaggttttttgccgtcaattgtagaaggctctcatttttgacacagccatgctgagataggataatacttgttaaatgaaacttcggaagggaaggcggtaccttgtcacgcagttcactcacccggtttctaagcggaccgtttatattctttaccattatcatgatgatcaaaagttcattggcctggattgttatcttcgatgacatccctgtctggaaaccactgctgactgaattgccgctcatctggatcggcttctgtctaattgagtggtttgctgccaagcggcgaatgtggatataccttgccatgaatttgctgctctcagggattttctttgctgccatcatgtactacaaatattatggtgtaatcgttaactatcacgcgctggcacaggtgaatcaggtgacctcggtcaagagcagcatgttttctttgcttgacccctattatttgtttatttttgcagacgttctgatcattggagggatactcattcgtcgtcggatcaagctcgggagtacagaacgtccgaaccgcattccgcttgaacgacgtgccagaagacgggttgcctcggtcattctgaccctttccatgatcctgtgcatgctcaacatctatcccaatcgagccagcatgagtgagcttacacaagcagaacagatgggcatcctcggttacgaggcgtataccatcctggatcgacctgataaacctgtgcccatcgctcacattgatcagactgacatcgaccagctgaaacaaacgaccgaacttcctgcgattgtggagaagggtgccgcgagcggacgcaatgtgattatgctccagttggaatcgttccagaactttctgattggattagaggtagatggacaggagattacgcctaatctgaatcaattggctagacagagcctgtattttccgaacttctatcagcaagtgggacagggaaatacatcagatgcagaatttgttgtgaacacgtcgttctacaccccgccgaacggggcagcaacaactgtatatgcggataaagctctgccgagtctacccaagttgatgtcagcaaacggatatcagacagctacattccatacaaatgatgttcgtttctggaatcgggatcagttatacaaggcgcttggattcgaccagtattatgatattaattatttcggcacacaggactctatcgccttttcggcctcggatgaagtactgtattccaaaacactggataagctggaatccatgcagtcttcgggcgatcccttctatgcccatatcatctccatgtcagcccaccacccgtacactttgcctaaaaacaaggtgaagctgacgctgccagagcgttacaaggatacgttgcccggtgattatctgatatcacagcattatgcggatcaggcggttggacagttgattgctggattgaaacaacggggattatgggaaaatagcttgttcgtcttgtacggggatcacctggggcttcccatttactcactggatcgggatgacaaagtccttatgaaagaattgtatggtcgggaatacacatcagcagatatgattaatattccactcattatctcggccccgggcgttacccccggtgtacaactggaacagatcggaggccaggtggacattctgccaacgattgcgggactcaccggtgtatcgctgaaggaccaattacacttcggacaggatttgttacacgaaggtggaaatctgctacccgaacgttattaccttccctccgggtcggtgctaaacgatgcttctctcttcattccggcgaaaggatacggggacggaacacattattccctagctgatgcgggcagacaagatgaagggcaacagcagatgaatgttccttcagaagaaatactgaagaattcgggagatggggaatctccagcattcgccacgcccaataacagtgtggtgccctcttcacggtttataacgaaggaacaatatgatcgggcattggatcttgcacacttgtccaacagttatttgagccagctcccggatcgaaaggacgcgaactgattttatttttctaatattctaaaaagagcttcatagtgaatcaccaagtactgaagtttcttcaagattacacatctataacgcacatgatccatcttacgaggatgaacatgtgcgttatttgaattacacacaatcggcattcaacctttttccatttcagaaggctacaagagctgatggatcaatattctttaaaatatttcagtagttccgattggaaaatttcagcagtaaaactacgctctcgatttttatgaacaatcagaccctgcgtaaagcttattttagaagtaaaaggaagaatttttaatctacccatctttagttcgtttttgatcgctattttagggaccaaggcaaaaccttttccacagcatacaagttccttgatcatctcaagacttgaaagctctaacgcatccttaaccacaatcccttcattctttagaacatctacagcagtcgtatgatacaaacaagatgtgccgttactgataaacacctcgtcatttagaatctgcgcccctacactttccactttccaaaccaaatcctcagatgcaacaaaaacaatagtctcttccataatcggataaaagagaatgtcatgtcgctcagggttttgaggaacaatgccaaaatccagggcataatccagcacactttttagaatatcttgatgcgccccttgttcaacacgtaaatttacgcttggaaagtttctcgtatattcctgtacaaatggaagcatgcgtgtaagaaaaaaggattcctgtagtctaatatttattgttccgcacggctgattcatatcattcatactttctttaagggattcacttaagtggacatactgataagcatatttggaaaatacttttccagcttccgtaggttccacccctcgtggaaatcgatgaaacaacttctgtccgcagatcttctccagctgttgaatatgagttgttactgtggactggacataacctaagcgctccccagctcggctgaaactcttctcttcaagcaaagcaataaatgcctgaaaaaaacgaccctctaaggaatttatcatatctttcacccttttgtattcggatttgaaattgctagcattcaatctattcgttattcaaataaacagtttaattataaaataaaaacacgtcatcaccagttgtacaagtaagtaacagaaataatattggacttcttaatgaatccagaaggagatgtaaaaaatgaagattagttatcagcaccagaaagttggagatgtcgaagttttttaccgtgaagccgggcctaaggatggtcaagttattttactattacacgggtttccatcctctagtcatatgtttcgagaccttattcccaaactggcagaacaataccgtgtcattgcccctgatcttgctgggtttggtcgcacaacaactccaccgcgtagtcagtttgacttcacatttgacagcctgtttcgagttattgaaggtttcactgaagcattagctcttaagaaatatgtaatgtatgtgtttgattatggggcacctgtcggttatcgcttggcagtggctcacccggaacaagttcaagccattattagtcagaatggcaacgcatatgtcgaagggtttagtgacgcatggggaccttgggagatgtattggcactctccaacacctgaaaatcgtgaagcatgtcgtgattccttaacccccgaaactatccgtaactttcagtatcttcatggaactgatgctagccttgtttcaccagacggatattcactggatattgcctacatgtcacgcccggaagccgaagaaatccaactggatttaatcctcgattatagaacaaacgtggatctttatcctgaatttcaggcttatttccgtagttatcaacctcctcttctagctgtatggggtaaaaatgatcctgcttttcttcctgctggagctttagcttataagcgtgatatcccatctgcagaagtgcatttacttgatactgggcattttgctctcgaaacacatgtgacagagatccatgagctcattcaccacttcttaaagaaaatattttaaatccatcatacattggctcaatctcaaccttgaactaaatagaaaaagcccgtagaaagcaggtccaataatggcctgttctacgggctttttgcatctgtcatcattcttcaaggtacttgcaacgccactatgatctaatgttctatcccgtccagtttacaacggcagtagcgcaaccgacttgcgagcagtcaattgctctaccatggcaagccattcctgcggtttgttaggaagcacagcataatatcgattcaggaaatcagccaccagactggctggcagttcatcaagcgactcatcacctggcatgaaacacagatccaatccgccaactgcttcaccgtcaccttgccaggatggatgaacatatgggaagtccagacgctgatatcccagatgggacagcacttcgcgacgcacatacgggtccatcggcttgatgccgccaaactcatgatcctgactcagataagggttatagatttcggcaaacataccaaacaattctttcccgtttgctgcagccagcttttgcagatcacgcttgcggtgattcgccaggaaactgccgatccccagaccttcacgcccaataatcgtaaagtccgtcatggctacgttccaatcctcgtaataacggtactctgtcgctccaacaacctgtccctcatgcacagccacgaacacccgaatacccggatcttccagtggttcttcccacagggggaagtccagcacttcttcccgcgggaaaatctcctgcatcaacttgtgcatttgggcaaacaatggatctttaatggatgtaatacgcgtgaattccatgaataaataccccctcgattgatgatgtatttcgtttaacatttctttatctgaacggattccgccactccatcagggctgcatagttgcaggattcctcatcgtccagatagtccgctgtcacaccaactggcatgcgcccacaacgaagcaggaacgatatcaccggatcacgtctttctcccgctgccacctggttcagatattcctgcgcagacagttggtctgcaaccaaatgataaccgggcattctaccagcacccagtaaccgatccatcccctgagcgatgacaaggtggtacatcgcctgcatcataagctgagccagtccccatttgcggtactttggacgaacacagagatcaacaatatacagcgtgttgccatccggctggtggttacgaatataaccgtcatccgttacttcggcccaggtatgacttgctggatgtgcagggtcccactgcatccgtagcgaggtcattgagccagccaattctccatcgacttcaatacagatggcaccctccgggttatgctgtacatgactggtgagctgctcgtgactccagagcagttcttccggataaggaggagggaaactctccgcctgaatgcgaatgagttcctcaaagtcggcagtaacataattgcgaacgactgcttttacccttttgccacttcgctccgggtcggtaatcagcatttctttggtatacatgttgccggttcacccctttccactgacaaaatgaattccctactctgtttcgcttcggttttaattatgtgttcaaaaaggtcggttttcagtaccgagaagatgggatgaagctagaaatggagtagcggagcgtagggaagactacgtgagcaacggacatttcggctgaattccatattcgatgctgatgatgccactaggcatccttcgtaatcaaaagcgggctttttgaacaacctctataaggttgcctactcccaatcggtatacagatcagtacggcggtcacgccaggtcgttaccgatccacgttcacgtacctcatacaacaagtccagatccagatcggcggtcacgatcatatcgttgttaatctcaccctcggccagaatgccacgtggcgggaatgggatatcattcggcgtaataattgcagcctgtccgtagttggcacgcatgaaatcaacggttggcaagttacccactgttccggttaacacaacatatacctgattctccaccgcgcgggcatgactcgtataacgcacacggtagaagccatgacgatcgtccgtacaggaaggacagaaaattacgtcagcgcctttggctttggccatccgcacaatttcagggaattcaatatcataacaggtcagcatggcaatacggcctttgtccgtgtcgaacacctcaagtccatctccgggagccatgttccattcctggacttcggttggtgtaatgtgaatcttgtcctgacgcgcgatgcgaccatctgggtagaacatgtgggctgtattatataacttcccttcacggcgaatgacgtgggttcccccgatgacgtgcatgtcgtacttggcagcaagtgacgtgaacagttgttcatattgctccgtaaagtttggcagatcctcaatcgtcagtgcattgccttgtttgtccccaatggacattaattgcgttgtgaaaaattccgggaacagcacaaattcggttccgtattcactcgctgtccgtatgtaatgctcagcctgagcggcgaactgctcaaacgagctgattgtttgtagctggtattgtacagcggatacccgcagtttcatgttcgtacacctccatcatgattatgcttccattgtaacaacgatccggggtcaacaaaagagtatttacaccaggcactacaatgacagagcaaccttccgatcgcttcccttactcacctagcatcgactgtgtgaatccgatccactctctcgtggcaaaagacagatagcggtccttccgccagatcatgccgagctgccatggaatcaccggttccaccacgggtataatgcgcacgcgcatgtggtctacctcacgacagatcgtctccggtagcaaggctactcccagattggcggcaaccatcgcgctgagcagatcccactgggagctctcatataccacacggggctggaacccagcatgctgacaggccacaataatccggtcatgcaatgcaaaatcctccctaaacagcacaaaggcatcgttttccagttcatgcagggcaaccgactctttccctgcaagcggatgtgaagggtgtacgagcaggttcagcttctctttcacaaacacaaaatgatccaacagttcatccacggttggcagtacggcaacgccaatatccagtgcaccactgatcacatcggcctccacttttttggcgccatcctcaaacagctgaatggtcacctgcgggtaggctttgtgaaattcgccaatgatcatggggaaaaagcttgatcctaccattggcggcaagccgatccgcagatggcctttcttcaaattcatcaggtcgtccaattcggacgacagactgcggaatgatttttcaatctcaagtgcctgccgaaaaaacacatgacctgcatcggttagttcaactttcttcccataacggtccagtaaagtgatacccaattcctcttcaagactcttgaccgtcttgctgatcgtaggctgggtgatatacagaacttcggcggcttttgtgaagctctgctgccgggcaacttccagaaaatattgcaaatggcggatatccatcggttgatactcacctctcatagacaaatggaatagtaaacattcttaatatgcattttactcatgaaataatgccatgtaaaatttgtgatatcaagcaacgtttccattcattttcataataactcaaacgattacgttgattatacaaggagggattgaagtgaaaaaatggggccttggtattgcacaagttgcgctcttaatggttttttcactgctcatggacctgctggcccgtactctccatcttcctgtacccggttcaatactcggtatggttgtgttattcattctgcttcagactcgtgtcgtgaagctgcgctggattgaagttggagctgcctggctgctcggtgaactattgttattttttatcccgtcagccgttggcatcatgaactatatgcccatgctggagcatgacggattgcagattttattcatcgtactacttagtacattcctggtcatgtcctgcacaggcctggtggctacacgaattgccaaacgaaaggagcgtcacaccggatgattggattcctctgcctgttgttaaccgtcggtatctattgggttaccaaacgaatgtatcgtaatctgccaaaagtatatctgtctccactgctcattacgccgctgcttgtcgttggcatattgctcgcaacgggaacggattatgccacttatagcagtggcggcaaatggctgagtctgcttctccaaccggccaccgtggcttttgccgtaccgctctatacctttttccatgtacttaaaaaacatatttccgagattgtcttcagtgtcatgaccggctcggtcgttgccgtactttcttctgccctgctcgccaaatggttgcgcctggattccggtctcattcatagtctgatcccaagatcgattaccaccccaattgccatgaacgtatccgccacaatcggtggcatacccgcagtgacagctgtttttgttattatgaccggtttgctaggggtgattatgggaccttcgattgtcaaaatgctgcgcatcgatggggagattgcacgaggcacactgtttggaaccggtgcccatggcacaggaacatccaaggcgtttgaactgagttccctgaccggtaccatctccagcatctccatggtgctcgctgcattgttcactttagctgttgcacccgtgctttccaaacttatttttccataatagatggcattatcccacttttttgaaatattattgttgtattaaagccctttcttccttacaataaggacaggtttttaattgtgaatattgcgggggagatgcgatgaaaagaaccggaatgaagagatctctggaccgtcttggacgaattgtccttcccaaagaaatgcgggatacgatggaaatccatatcggcgatccgcttgagtttttcattgaaggaaaagagttgattttaagaaagtacaaatcaacattatgtattttttgcggtgatgtagatacggaaatgtatttcaaagaacaattcatctgccggacttgtgcaattcaattaaaacacccggatgactctcccaactggttcgtacctcagaacaaacaggctcctgcacccgtggagcgtcctgcttccaaatccgccccagtctcatctcccgctagggaagaagggaccacagctgacaaccaagaatacccggacctgcggccaaagacggcacgtatgctgcaacagatgaaagaaattgttgaacagaatcccggtttggctcaacagcaaattgcggaaaagcttggcatcagccaaggacgcgtctctcaattaaaaaagttactataatcaaaatggcatttgatcatttatagtcagaagaccttccgatcaggaagtcccgctgcaagagaacccgttgtttttcgtgggttcttctttttttatattcatattgtaatggaaaggagttctatggataaaattctgtatttatcacaattcgacctcatgtcctccttatccgaggcagacctgattgaaatggatgggatgacttctattacgaccatacctaaaaacagacagatccagacacccgatacgtttacagaaggtttctattttgtaaaacggggaaaggttcgtttatatacattaaatccggagggcaagcagttcactctcgatattttgacggaaggtaacgtgtttggagaaatgaacggaatctcactcggaacacgcgccgtttatatcgaaacgatggaggagtgtgatatttgcctgatgaacaaacaacgttttgaacagtttctgattgaacatccagaatttatgatgagactgatgaacgtactaagcgagcggatcaaacgaatgagcgagttgacacagacgcttgcactcggaaacctccatgaaaaggtgatacataatctcttccggctggctgaacagatgggatgcatcgaagaagatgagtactgccggattcaactcgggcttacccatcaggagattgcctggatggcaggagccacacgggaatcggttacgattgtcatgcaagacttggcaaaatctggacgtattcgtaccggattcaaatcagtctcccttcatcgtgacgaaatcgctaacctccggaaaatcactgaccacttgtaagatgccttacatccctgctctccagcaagttgtactgtataactcatgatgttatacaaccaaggaggagtataccgttggatgctaagccaaatctatttatccctgaagacatttttcttcgcaaaggtgcccgtaaagcaacggaaattcctgagcatatccgcaattggctacaagcaggacatatcgaatcggtcaatctgaccgaatggctggctgtagatcatgtttctctttttcagaaggttacccatgaatggggaatggatgccgaaaccagagcaattacagagcagttaacacagatggatgagcagcggatcatgaaaatcatcccggtcatagccatgcaatggcttgatctgttgaaacgtccatcagtcaatgaaaaaacgaatctcttttgttccattgcagagcatcgttcagacagtgttcgctgctgggcggcttatatcattgggctagattccggtctgaacctgactgaaaagttggagcatattcggccctttgcagcagatcatcactttggtgtaagagaaatcgcctggatggctgtacgggagtccatctctgccgaattatccttagccttgcagcagttaatcccatggagcgttgaccctgatccactgatccgtcgatttgccatagaatcaatcagacctcgtggcgtctgggccaagcatattcaggagttaaaagaaaatccggccatggccgttcccttgcttgacgcggtgaaatccgatgcccataagtatgtgcaggattcggtaagtaactggctgaacgacgccagcaagaccaatccagagtgggtgcggcaggtctgtgccacttggactcagcagtcggataccaaacatacgcggcgaatcgttacacgtgccacgcgaagtcttacataaaaaaagatgaccaccgcttactggcagtggtcatcttctgcataggcatccgcgtttacattccttttgacaggaataccttttcctcagtaaatagcccaataacgttccctcttatctttaacttacgcctgaatcgcgtccatctggccttcttcttccgcttccaatctgcgcatgcccacaaccaaaacaattatgttagctaccaacaacacagccgggaacggaacagcagcgtattgtgcatagatcagatgacttcccacggccccaatcagaatgaaggtcagtatgccagaagccaggatgcgagtccgtggaatcagcagtcctacagcactaagcaactccgcagcgcccagcagatacatcgtccatgtcggataagagaaactttcgaatgtctgaatcatcatatctgccccactaatcttgttaaaccccgtcatgacgaagacacctgctaacacaaccagaaaaacgtaacccaaaatctttttcatatgtagatcctcctgtaacaaattatatgttcctactatgtaatgattatttttgctgcacattgtaaaaaaagaatctatgtaaaagttcccaaaggtcactctgttttcaaccgttcagcccagttcaattttcagaatagtacgcgttcatattatacgtattatttatcaccaacttacttttgtgaagttagtatataataataatataatttcttcaagtaatttttcactgtatgatgtataatacatacaaaaggtatgttacagtatattttgtagtaaccctcatttacttggatgtcctatattcttaaagcggcagaaatcatgtcctttcatatacaactttgaagaaaatcattatgaatcgaggtgaacacgttgaagctgaaaaaagtaaaatcaccaagtccctgtatgatcactcaagccatagacatcataggcaagaagtgggtactgttaatcatgtaccaactgttgtccggacccaagcggtttacggagcttgaagcagagatggcgatcagtggacgacttttatcggagagattgaaggaaatggagacggaaggtatcgtaacccgacacatgtttcccgagatacctccccgtgtagagtatgaattaacaccgaaaggcagagccattgaacctgtcattgatcagatctacagttggtcatccgactggttgaaacagcagaaatccgagtagttgaattgctacttaataatctctactcaacacaaatacgcctgaatcaggctgatctgcggatcattccctgattcaggcgtatttatattaccttcaaccttttaatgagagagatgttttgaaggctgaagctgtaccggcagaccggagtctgcagatgccagcgccgccgtcgtaatctcctgtgtacggcaggcatccgcataatcggacagaattcgtgaacggtctcccgtacgcagggcgtgaatgaacgcttcattctcacgctcgtatgggttatgtcctgccggaatctccagacctgccatcgcatgttttgcggcacttggcagaagcaaacgttccggcgtccaatcccacacacctgcatccgtgtagaactggagtcctgcgccgccctctccgtctggcaacagacatgtattcgcgatactggcaatcgctccactttccagcttgagcgtcacatttgccacatcggctacggtcacatgctcatgcttctcatgcatgcttcgctgagctgctacagcatatacctccgtaacttctcctgcacaataccgaagcaagtctacaatatgtgtagtctgctctacgaattgtcctcctgaaccgtcctgacgccgccaccaggcgactcctggcattccgcccatccagcggccaagagccatgccgaccgtctgttctttcatcgattgctgcaggacctgcgcggcctcctgataacggaaatggtatcctacagaggttaacaatccgctcttttgcacctgatccaatacctgacgcggaacatccattccggtgctcaacggtttctccaccaggaatggaataccgcggcggattaattcggactcaatcgatccgtgagacatcggaggcacacagatatacaccgcatccagcttctcaccatccagcatatgttcaagttccccgtaaccaacagcatcataaacggaggccatagcctctgccttttcgagcgatgttccacagacactcgcaacacgaacaccttccatccgtgcgagaatatccgcgtgtaccttactgaaccagcctgttccaatgattccgatctgtaatgtcatggatgtaatcccctctctatgttacacgcttacatgttccattcgactctcgatcttgaaatcctgccttagattttgccggatgcttccagcaacagctgatccagttcctgtgtatgtttaagctcttgctcttcagaccagttcaaacaacctgccatatatgagataactgctgctttatagcgacgaacttcatcaatacggaagaataaatcacctgttcttcgtaccaaaaagtcagatggggttacagccatctcttcatcaatcgcgtaatgtagcataagcaataactcctgtggcatgccatgaagctcggacttggtgcgtggatcgggcattcgctcatatagtgcctccacattggaaccatacgtgcgaaccagccgctccgcagccggtcgggcaagcccgagggcaacaccgtccttgatcttgcgctccgcatacgatacaaatccagccgatccccctacatcaccgccggagatgggcatcttcttcgttacacaagggcctatggaatgtccactctcctgctccatctggcgtgcgaccagatcaacaaccatctcggccattttacggtacccggttaacttgcccccggcaatcgtaatcagattggattcggatacccagacttcatctttacgtgatatttcggaaggattcttgccttcctcatgaattagtggacgtacacccgcccatccggattccacgtcctcggtaccaatgtgtacatctggaaacatgccattaactgcatcaatcacataatcgcgatcggagtcggaaatttgggggtgtgcaggatcgtcctgatatacggtgtcggttgtccccacataggttttgccatcacgcgggacagcaaacaccattcgaccatctggtgtatcaaaatagacggcctgtcttaatgggaatcgttcaccatcaaagaccaaatgaatgcctttggtcatctgcagcgttttcccctggcgcgaaccgtccaattcccgcagaccgtccacccatggaccggaagcgttgatcaccttgcttgctttcagcgtataggtctgaccaccgatctgatccatagcttcaatacctgtgatcttgccattctccttcaggaaacttttcgccttaacgtagttcactgcctgtgccccacgtttgacagcttctttcataacttcaatggtgagcctggcatcatcagtccggtactccacatagagtccaccacccaacaacccctgtttgcgtaataaaggttcactatctgacaccgctccagcattcaacatttggcgccgttcactgcgcttcaccccggcgagccgatcatacaccatcagtccaatggatgtgctgaagcggccgaacgtacccgccgtgtagatcggtaacaacatcggttccggtgttgtgacatgtggcccattttcataaactacagcccgctcccgtcctacctcagcaaccatcttcacttcatattgcttcaaataacgtaatccgccatggacaagtttggtcgaacgactggatgtacctgctgcaaaatcctgcatttctacaagcgctgtcttcaatccacgggaagccgcgtccaatgcaatccctgcgcctgtaatcccgccaccaataattaatacgtcaaaatgtacattcgccatgctttgcaaatattcggtccggtgtgctgacgagaacgtttctgtcattcttgaacctcctattgattttctcaatttttccgtaaaaaaacaaaaaaaaggaccacgtcattcgctcagcaattgctgagcggcacgtggtccctcccgatctccagacatcatttttttaacttgtgcctttatcctatcacagatttttgacggcgtgaagtcctgaaatgacacattattcaaaaaaaattcaaaaagttgttctgccaaaggatggaatttcaaatgaatccactaaccttgtttttttccttatagtgggtatattttttgccttctacaggaagaataaccctgtaaatcatgcatcattttccaccagtaaatatcatttataacatatgtttagttaaaaagtacaaatacccacaccaagaaatattcatttcatttcttttatttaaaagccattgctgcgttcactgcacgcttccaacctgcatacaattctgtccgcagttcctcagccataacaggctggaagacacgctccgtattttcatgatccgtcaattcatccgcactcgtccaatatcctaccgccaatcctgccagataagccgcacccaatgcagtcgtttcattcaccgttgggcgttcgacaggaatgcccagaatatcactctggaattgcatgagaaaatcattggccgccgccccgccatccacacgcagagcatgcacgggaatacccgagtcggattccattgcctccagtacatctttggtctgatacgccaacgcctcaagcgtagcacggataaagtgttcctttgtcgtgcctcgggtcaggccaaacaccgcacccttaacctcactatcccaatacggactgcccagtcccacaaatgcaggtaccatataaacgccgtctgtcgaaggcacacgtgaggcgtaatcctcgctatcttttgaagagcgaagcattcttaatccatcacgcagccactgaaccgctgaacctgcaacaaaaatgctgccttcgagcgcatattcaaccttgccattcatcccccaggcaatcgtggtaatcagtccgtgattggattgtaccgggttctctcccgtattcataagcatgaaacaaccggtaccatatgtatttttcatactgcccttggtgtaacagccctgaccaaacatcgctgcctgttgatctcctgccgctcccgcaatcggaatccgatgaccgaagaaatgatagtctgttgtgtgtgcatacacctcggatgaacctcgtacttctggcagcatggccttaggaatgtcgaggatatccaacaattcgtcatcccattgcagatcatagatgttatagatcaaggtacgtgaggcattggatatatccgtgacatgtgtgcccccgctcagtttccagatcagccagctatcaatcgtgccaaatagcaattcacccttctctgcgcgctcccgggcaccagggacatgatccagaatccacttcacctttgttcccgagaagtagggatcgattagtaatcctgttttacggcggaaaaggtccccgagaccctgcgtcttcaattcttcacagatatctgcggtctgtctggattgccataccactgcattatagatgggtctgcctgtttctttgtcccataccacaaccgtctcacgttgattcgtaattccaattccggcaatctgaacaggtttgattccgctctctgccagacatgaagccatcacggcaagaatggaactccagatttcgttggcattctgctctacccagcccggtttggggaaatattgagggaattcctgctgtgcaatgtgcacaatctccccgccacggttaaatagaatagctcgggagcttgttgttccctgatccagagccaatatatatttttccatacagccaacctcctgttgtgggttctttttaagatgtaagcgatttctcgaagtgtcggatcagatctgtgttggatgtggtcactgccgtagccccgacgccaagcgcaagttcaacctcttccggtgaacgaatcaatccccctgcaataatgggtatccctgtacgcacagatacttccgcaataatatgcggaatgacgccaggtaatacttcaatataatccggttgggttttggccagcagcagataacttttctccagtgcatgggtatcgagcagaaaaatacgttgaatcgctgtaatgcctttctgctttgccttctgaatgacactcgctcgtgtagagatcagtcctgccgggcgaatgtgctgacacagatactctgccgcatactcatcgttttttaaaccctgaaccaaatctgcatgcaaaagtatctttttgtcgtaccgccgagcctcgtccattacactctgaagctgtgcaatatgcgtttccagcatcaccccataggtataagggccttcaatcatcgcttcaaactgcttcatgctctttgcagccggcaatatacgttgtccctcaaatggcaccttggttcctcccgcattcatcagatgcctatattgtataatccgcactgcgggaacggcaagccattccgtgaatcaggaaaacctgatcgctaccctatcatccatagcaaaaagccgctgctgtacttctccataacagagagtacatcaacggctagccatctattcgtatacgtctataaatattgattaaccctgcgcatgcggaagtagcgtctctgccccagcccaaccatcactttctgccaaatgaccggaacggttcactttcgtttgcagatatttctcgttgaaagcagagcgatctccccatagtggcacacgtccgcccacattcaatcccgcttcctgcaaagcagccagcttccgtggattgttggtgatcaatgtaaccggtgcggagcgaagcgcacgcaatacggcaatcgcatcgtcataattgcgggcatcgtctgtgaatccgagttgcaagtttgcatctaccgtatccagaccttcttcttgcaaaatgtacgccatcgctttgctgaacagaccaataccacgtccctcatggttcgcaagatagaatagtgcgcctgctccgtgagcggcgatcattttcatggattgctccaattggaaaccgcaatcacagcgtttgctaccaaagatgtcgcctgtatgacagatgctatgcattcgaatcagcgcttcttgtgcgtcggcaaagtcaccatacaccagaacactggattgttgacgctctgccagttcagcttcagcaagagattcaattaactcgccgctctccattgctttgtctgacttcatccagctataccactggaatgtcttggtctccccatcgaggtttaccgggagtttgattggccccaccaggtatatgaactcttttccactcggaaaagtctgaattttgggggcaagcagttgaataatatgtgaattgatcattgtcgttcctcctgtttaggccaacttgtatgttgattgattcgcatccaaagcgaaaatggatcacttggacgttatatagtacgtatctatattattctcatcatcattagttactttatgtaagttagtttagaataaaaattataatgtgtcaagtaacttttatttttaaagtaactacccaatttatgttacgcaattgacacaaatatgtgtttcattttaggaatattgggtatgagtttataaactgctcatacactaatgttgtagtccaaagcacttcatgcctcgaacttaatgatgagggggtaatacacatgatccgccggaaaagaacatgctggacagccatactgatggtctgcgtcctgctcataagcggatgctccatctggcccggacaggacgattcagcgaacaacaaaaaggtagcgcttacattatggtactggaatcgttccatcgatgataagttgattgccagggctaaggaaaagttccccaatatcgaactgacagctcagaaaatcggcggtgatttcaaagcaaaactcaaaacaacactcgctgcacgctcaggtgaaccagacattgtagcattgaacgactggatcatggagctattccccagtgaggaccgtttctataatctgtatgatctcggtgcaggagatattgaagaccaatatctgccgtggaaatggaagcaaggcgttacgccaagcggacagatgattggtttcccgatggatacgggcccaacagccctcttctaccgagaagatctgttcaaggaggccggattgccatctgatcccgaggacgttacacgccagatcaacagttgggatgcatatgttgctgccggagaacagctcaaggaaaaattcggaggcaaggtttttctaaccgacaatattgcaaccgtttacaatcaagtcatatcgcagtctgcggagcgttatttccggccggacgggtcctttatcggcatggattcccctattgtgggcaagagctgggatacggccgttgctttcaaagagaagggactgctagccaatgcagatggctggactccaagctggaacgccgcgatgaataatggcgaaatcgcctctttcgtgggcgccgtctggatgaaacaagttcttcaggaagccgctccggatacatccgggaagtggcgggtcgctcgagcaccagagggagatggcaacaacggaggatcattcctgtccatcctgaagtcgagtgaacatcctcaggaagcctttgaactggttcgctggctgcaaagtcccgaaaatcaactggagcaatatcagacactgaacctgttcccttctgcaccaggtgtgtttgatgatcctgccatgaaagaaaaagaacctttcttcggtggacaggcgacagggcctgtatttgccgaatcggcacaggatgtgccggatgctttctttggcgaaagatacccatccgtacacaacattatcactcgacggctgaatgatgtcgcgaagcaaaatgccgatccacagcaggtctggacggatacggtacaccgcgtcgagcgggaattgcagcgttaacctgaacaacgtgtggtttcgttatccgcaaaggaggaattcatatggctgtaactgaacctcgtcttactcccgatcccggaaatgcaagacctgatctggatcggcagaagtcactgtgggccagaatgtgggagcatcgtgcactttatgttgcgatatcgccgttttatattctgttcgcggtatttggcctgttcccgattgggttctcactctatctggcttttcataaatgggatggcatcggtgtcatgacgtttaacggactcaacaatttcaaatacatgctgaccgatgccgagttctggcaagccgtgggtaacacgttcatgatctggatctattcgacgattccgatgctctttttcgccctgattattgcctttttgctacatgcaccatttgtgaagttccgtaccctgtttcgggtcggttattttctaccaaacgtcacatccattgtggcggtagccattatcttcggtgctttatttgccaacaattatggctttctcaattatctgttgcagtcggtcgggctacctgttgtggagtggcttaatgcaccatggggcattaaagtcgcaatctcctccatggtggtctggcgctggaccggatataacgccgtcatctatctggccggacttcagagtattccgcagacattatacgaagcagccaagattgatggcgcatcagcgatacagtcctttttccgaattacaattccgatgctgcgtcctgtgatcctgtttacggtcattacatcaacgattggcggtatgcagctgttcaccgagccacaagtattggtaggtaatgacggtggcgcaggtgcagcaggcatgacgattgtactgtacctctaccgtgaatccttcattaacaattacttcggatatggcgctgccgttggttggggcatgttcctcattatcgccctgttctcgattgtgaactggaagcttgttcaaggcaaatcatcctgatgtgataagggggagcgcacatggcgaccaaacacctcaaatcgctggtgttgtataccggtcttatcgggggcatgctcatatccatgttcccgttctattggctgatcgtaatgtccacccggacaacgtccgatatttacaagtttccaccccagctctggttcgggggcgaactgtggaataatatcacgcgggtgttgcagcagattgacttctggggagcttttctgaatacgttgtttgtgtcgggcctcgtgaccatacttgtactgttttttgactcactggcggggtttgcgtttgcgaagtttgaatttcccggcaaaaagtggctcttcatcctgctcctcgcgaccatgatggtaccttcccagctgtcgctggtgccttccttcgtgctcatggctacgttcggctgggtcggttccttcaaagccctcattattccgggcatggtgaacgccttcggtatcttctggattcgccagtatgccacagagtcgattccgaacgatctgctggatgcgggccgcatcgacggctgtaatttcttccggctctattggaacgtggcactgccaatcttgcggcctgcctttgctttcctcggcgcgttcacctttatcggcgtatggaatgattatctgtggcctttgatcgtcctgacggatgaacgcaagtatacgttgcagattgcgttgtctcaattaaacggactatataacacagactatgccatggttatcgctggtacgttgcttgccgtcattccactcatcgttatgttcctgttcatcagccgtcagtttatttcggatattgccgcaggagcagtgaaggactaagattgtggcattttgatccatccctcaagtctgatattcttatctatagatgaaataacagatgccatataagttggatgaatagcgccacgtgcacgaaggggacagaaagggcctgaagaaatggaatgttcgcatttataaccaaatttctccctttgaagagggaatcaagaaatttggggataacggcgatcggaaggctttctgtacccgaagtgttaacgtgtaacagcattcattcacttatatatttaagaaagagggatgacaaaatggcttcttcaccctatatgatcggcgtagatatcggcacgacctccaccaaggccgtcttgttcgaacagaatggaaccattgtggctcaaggcagtgccgattatccgctgcacacccccacacctgcgattgcggagcaggatgcggaagatattttcaaagcagtcatcgaatcggtcaaacaggccacttccaaagcgggagtgaagccagaggacatcctgtttgtatccttcagttcggccatgcacagcattctgccagtcgatcaacagggcacaccgctgatgcgggccatgacatgggcagataatcgcagtgccgagtggacggaagtactcaaatccgagatgaatggtcacgaaatatacctgagaacaggtacgccgattcatccgatgtcccctctcaccaagatcatgtggctcacccgggatcagcctgaattgttcagacagacgcacaaattcatatccatgaaagaatatgttttctataaattattttctgaatacgtcattgatcactccatggcctccgcaaccggactcatgaatctggagaaactcgactgggatgctgaagcgctgcatgtagcgggcattacgccggaacacctgtcccgattggttccaaccactcatgtgctgaaacatgggttgcacccggagtacgccaaggagatgggcattgcggtcaccacaccatttgtcatcggtgcaagtgatggtgtgctctccaatctgggcgtgaacgccattgatcccggcgtcgtggccgtgaccattggtaccagtggagcgattcgtacagtcgtagataaaccggtgaccgatccaaaaggacgcttcttctgttatgcgctcacggaggatgcatgggtcattggcggaccggtgaacaatggcggtgttattttccgctggattcgggacgagtttgcagcttccgaggtggagactgcgaaacgacttggcatcgatccatatgaagtgctcactcgtgtcgcagaaaacgtacctccgggttcggaaggtctcttgttccatccgtatatgacgggtgagcgggctccactctggaatccgaacgcacgcggctcatttttcggtctgacgctgcatcataagaaagaacatatgattcgcgctgcgctcgaaggtgtgttgtttaacctgtacacggtcatgctggcgatcgaagaaaagattggccgtccgaaaaaaattcaggcgacaggcggcttcgcccgctctgagttgtggcgccagatgatggccgatattttcgatcaggatgtcatcatccccgaaagtatcgaaagctcctgtctcggcgcagccgtactgggcttgtacgcccttggccgcatcgattccctaagtgccgtctccggcatgatcggatcaacacatcggcaccagccgaacccggacagtgtccgcgtttatcgggagttgctcccgatcttcatccgcatctcccgtaagtttgaagaagagtatgcggatatcgctgcttttcagaataagacgatgcaagggtagggaaggcgtgggacggcatgcaggataaccggagaacgggacggtgtgagggctagaaggttaaaagcctaggatgttgcaacacgttggacggtcaaaagttgagcatggaatagctaacgaatcgtagacgtcttatatgaagcttttagcatgttttcaaaatctaacgaacctgagccaccttatatcggcttacatgggcacaaaactgatctagaacctaatatgtagccaattaacttgtctgtggttcgttagaaaatcacttttgccaaataccctccaatagcatgtgtacagttcgttagaattaatacgagatatcgtaagttaaagagacccaccccgccatggttatgtccatatgggaatgggctttttttcatgcacagactatataaactctatttagattggatcaaatttatctctcatcatacttggagcttccctttatgttctattaaagtatccaggggccgccacagcaaccgtcctaaaatagaaaaacctcttttccagttcctgattctctggcataaactcggtcagaaactcaactgaattcatcatttcttcggtcatcacgctaggtctccacaaagccaattggatgtctttgaaaataaaagaaaatcccaactccgcatcgatgtctcgagtatatggtgtcttactatctattagcttaacgagatcatcagcctttgttcgaaaaacatcaatattatcatatgtaaggacaacatcagattcatcaggtggataatcgtgtggattagttacttcaatgaaatagagtttatgttccgaatcatactccatttggttgtagagctgactaatctctggggtgatgcactcaatgatctcttttacctctgatttactcattcccaacttaaatggtccaataccgaccatcggtatgacctctaaaggttccatgacgtttcggttcccaacttcgttcatgtagttcactcctctttattccaacaaataagaattataatgttcatccctttattctaatcctaccctaaaaagaatgattgagcatgttgggtataacaaaaccccacagcatgaaaaagcggtggagttaaggtttcctatcttttattgattcagatttctaacaactatagaactgaaatcctagattttaattactgattatacttgttgaacgcattctggtcggcctgtacattctccagatacacaatctgtcccgcatcatttacacgtgcgatatcaatgcctgctttggcatataccgttccgtctgccgcttgtccacataccgcccagttcgtttggtaactgccgtcgggctgttgcacccacgcatcccacatatgttttacatccttattgtattcgtagaaagctttcatgaaaccattgaatcctgttcgactggtgccgttaagcacaatctctgcgtccggtgtaaacagagacaataagtcctgcatggcgcgctcgtctgtacgtgaagcatcaaataaacggaaatagttgttcaacagtgtagtggtactcatagtactcatttatattcctcctagaataaaaagccgttttccaatctttcagttcgaatattttcgaactaattgaaaagaaatgtatcatacttcttatactgcctgcaagaaatatataagttgagaccgacttttacactaacacggagagtgcagaaccaatctgaagaagcgaagcgttcgcctttatcaccggatttttcccttggaccaagggaataaagaaaatctggggataagagcgatcgaaagatggtaccgcaatcggagtaaacaagtgtaatagttacagttcaacttctatagttcgatatttttcaaacattgaaagagaaagccgaatatgctaacgtcatagatatgagaactccaacgatacctatggcttcggaattgaagctgaccacggtctgcaatgcattgggcgatccgatccgcatgaaaattgcacactgtttggccagttctggcgagaaaaactgttccgccttcgaagttgaccatatttccaaatccacgttgtcccatcacatcaaaattttacgtgaagctggcgtgatccagccacgcattgaaggtaaacagcacttttattccctacgaaaggaagaattaaacgtacgttttccaggcctcgtcgacatgattctgaatacaaacgaggaatacgtaacataggccctagataaattgaattaaccctttagacaagaacgtagagggcagaaataacctgaagaagcggagctaaaagctttctgcaagaaagctgcatcgtaagcatacgctattaccagaatttcaccttttaaaagtaaatcgaaaattcgggcgataacagcgatcggaaggttgttctgtcatcgaagtggcaaggataaaaactctttagttcaatcttatagatcaaagcatcacattcatcataattgcaattcccataaaggaggctaaccatatggacaaaaaggcagcaaagatactgctgagcaccttctggggaggtggtggctggaaaacaacctctctacccttctccggggaggaatttgaatatgccaaaagcaaaggtgttatgttcgatccactcacgatcacgcatgacgagattgtccagcgtctgtacgacatgcatcaggaggactcgtttaaggaatgggtgatttcggcatttctacatagtctgtccaccaaaaaagtctatctacgcagcgcattatccagctgggctttaacatcgaacatgcctttacacacctatgcggaacgcccttcccttcaccctaacaccagtgcctgtggagattgtaacttcctgcgtttgcagtcagacaaggaatattccaatgtcgacttaaacgtccttaattttgaacggatcaagtggggcagcgtgcgtcacggctggcttatctattgccttatggatctggaattactgcttcaagacaacgatgcaaactatgaagtaactcctgaagaccaagccatcctgatcaacctgcttgaagcagctcagacggaagaccccaaagacagtgctcgctcacttgagaaaaagtggaaggatctctttccttccagcaaacaggagcgggatgccctgctggaaatttgggcggcagccggcatactggcccctggagataaaccgagaaaacgcaaaggtggttccagcgattttgtctttgcagcaacttggcaaggtgatgatggatatcatacagaagccgtaaaacattatttcggctcctatcttcctcacatgcaataaaacctgaacttttgctcacctttgcgtacgtctggttacaataatgacatcgacagatttcctgtttaactcgtataataaggggaaattggtagatgggagtgaaacaagcgagtttatgctatacatactggcttttatagtgtcttttgctgtcgtggttctgcttattccaccgcttggtcgattggctcaccggctcgattttgtggacaagcctcgggaagatgtggagcgtaagctacacaggcaacctatcccgctcacggcgagttacgcgatatttactggatttttcctgacatacattgctcttacgaaagaaatcacatgggaaacagcggctctggttgctggtggtatgcttctgctaacgattggtaccgtcgacgactggtacaaaacaaaaggcaaagattttcctgccctgcccaaaatgctcgtacaggtctctgcggcagtactcgtatttgcttctggcattgcgtttaccggattcgtgaatcccttcaacgcggaatatgtcatgcttccgatctggctgcaattcattctcacgatcctgtggatcttcggggtgacaacagtcatcaacttctcggacggcatggacggactggctggcggattatcggccatctcggcaattaccctgttcatcgtggcgcttgccaaaggtcaaagtgattccgcactcatgtcgatcattctggtcggtgtaacgattggttatctgaagtacaacaaagctcctgccaaagtgttcatgggtgatgcaggcgctacgttccttggcttcattctggcggttatcgctctggatggtgcattcaaacaagcaaccatgttgtccatcttcattccgattctggcgctgggtgtaccgatcttcgacaacatctttgtcgttatcaaacgtttcattcaaggtaaagcgatctatcaggccgatgcaagtcaagctcattatcggttgctgcgtgccggattgaatcaaaatcaggtggtgggtgtgctgtatctagtcagcacatgtctgtgtctatcctccattattctgatgttagtggagttataaaaccaaaataacgatgaaaataatagaagccaccttcattgcgttgagggtggctttcttatgatgtttttttggatcgcttgcctttttttcttttcagttaaagcggagtgattctaacttacgatttaacagcccctgccatagcacctccaacaatgaaacgttgcaaagcaacatacaggacaaccagtggcaaggtaacaatcagaatgccacacgcgagcagcggccagttgttcatgtactgtccataaaatgtaaagagtcctttggttaccggctgataattcggatcagataaataaatggtcggcccgataatatcgttccatacaccaatcgcggtaagaataatacctgttgccaggattggtttcattaacggaacaaggatagtgaacagataacgtgtatatccactcccgtccatggccgccgcctcatccagttcacgcgatattgatttgatataacccacaaacatgagaaaggcaatgcccgtacctgtcgtcttcaataagatgtacccgatttgggtgttgtaaagacccagattattgatcagggaaaactgcggaatgagcgggttgggaaggtacatggaaatcagaaagaaaatataaatgagtgtgctgaatttaacatatctgcgtgcgagcgggaatgcagcaaatatagataaaatcaacgtcagcagggtggacatccctgtatagagcacactgttccacatatactgagagaagttccctttgttccatgcttcggaaaagttctcaagccggatcccttcggtaagtgctacaggatcgagcagatactctgtctgtgtcttcatggatacattgaacagatagaatagagggaaaacgtacaacgcaagcatgagcagaacgataacgtagctgaccattctggacgtttgactctgtttcattacgcttccacctctcttctgcggagataaaataaagcaaccatcgatatggtaaatacaaagaggaactgaatcatcgccacagcagaagccaaaccgtaatcagccgttcctgtgccaaatgccgtagcataaacatcaaacgcaagcgtcgttgtattgaactttccgcctgtaagtacatagataatatcaaaggtttgcaatgcccctatgatagacaagagcatgttaacggtgaatgcaggagcaatcatggggaatgtaatgtttgtaaatgctttccaccccgaagcaccatccatgtaacccgcctcatacagatcactcggaatagactgcagacctgcaagaaaaatcgtcatggagtaacccatgtacatccagatttgaacaaaaataatcaattcgaaggcaatattataatcgccaaaaaagttggaactggtacccaagaaattcagaaaggactgggctggtccgcccagcggatttgcaacgagttgccaaatgagtccagacacagtaacccccagcaccactggcaaaaagaataccgcgcgatataatttatcgcctctaagctttttattgatcaaaatcgctataaacaaacccactgcattttgtatgatcacaacagcaaacgcaaagtataaggatcgcccaatagcatccattcggtctccagcattggatgcaccaaaaaatgttttatagttttcaaagccgataaagctccattcctggccccgaacaccagtagcatctgtaaacgaaaacagtatcgtcacaagtgatggaccgaagccaaacacgacataaagtaacaacggaatgctcaaatacagataaggaataagtcttgccttacctttcccaaacggatacatcgtcctcacacctttcatggggtaaaactaagacataagaaaaccggaataacagccttgtctggcctgaaggctcagacccgagcgctattccggcgcatacggccaacttgtgccatgaatatgaatgattatgaattactttggagcagcagcatcccagtccgcttgggatttacccgcaagctcttccggtgttgcaatcggtccggctggcttgagcatctctgcgtgaacgctggcctccgaaatgtactgtcctacattctgacggttaatgaacaactgatcccaagaaagtttaaagtcctccaggtaaggctgaatgccttggataaactcacttgtcatctccacatcaggctgtgttggcaggaatccggctgcattcacaaattccgtgtagttctctttctccgataacatatcaagccatttcattgcgtaatccttgttcggtgagttatccaccaccatccaagtcatatcgtatttacccgccagatttttgttcttggctgcatcattgctacctggaattgggaaatatccaaacttcagatcagggttggccgtttgaattgttgttgcatcccaagtaccgtcagcaatcatagccaccttgcctgtagcgaacaaactgggcaatgttccgtagtcaatacccatgaaaccaggcattgcattgttcatcagatcctgagatttctgcaagacttcaagttgaaccggatcagtcagcttggtttcaccagtccatagacctttgatataagcaagctgatcttcatgaatagaggcctgaagcccttgcaccgcaagacctattggccatacatctttacccgccagacccagcgcttcgacaccattgtctttgaacactttgataacatgttgcaattcatcccaggttgtagggatctccagattatattttgcgaagagttccttattgtagaacagtcctgtgaatgccaccttgcccatgtttacaccgtacaccttatcgttatacgtcattgcgttctgtacatccgcttcattgtagtttttgataaaagattgatccgacagatcactgattaacccggcatcgatccattgcttccacattggatcagcagcaccactggaccattcctgtggagcgcctacaaagcttgatttgagtggaatgatatctacgtccccattacttccggcgttcatccgtgtttgcatcaactgatcgtaagtcgcgtctgccggaacggtagtatactccacctttacgtccggatatttcgcttcaaatttcgtattaaactctttgatgtagttgttaatattctcttgctgccagtgaatgatcttcaaggtaacttttttggtgctgtctgtagcctgagttccttctgattccgaagagctgttactacaagcggcgagcacacataataaagcggttacaagtacaatggttaaagtcattttcttcattttcgttgtcccccaaatttttgaattaaatctacgaaatcagtttcgttaattccacccttattatgacttcagatctttattttgtaaatagtcattttgtttttttgatttccatgctttaacacgcttgataaaagctttatttattgctgtatacgttgaaatcaaggtaccctttacgatagtcacgaaagttacgaaacacagcacatgacataatttcatttaagccccagacaacccggcattcctttaaatggactcaaaatctgtaaaataattaagattacgagctaaaattagtctttattttcgcaacaaacctccttgatcacttcaaacctatggatgcatattatttcaagtgtgaaaccctctctctgctgttgactctccggtctatgtagcatagaatacttgcaagaaagcgaaaaaaccgatacagccccagtttacgaaaccagtttaggaatccgagggatgtttatgaatatcaaaacgatagcgagtttagccggcgtgtctgtagccacggtgtccaagattatcaataactatccagatattagcgaggaaacgcgccagcgtgtgcttaaaattatggaagagacaggctatcgtccatcttcttcagccaaaacactggcaaccaaaaaatccagcctcgttggcgttgtgtttgcagggaagctgaacgtggatttcagccaccctttcttcgtacaggttatcaatgcgtttaagaaacaaattggcttgcttggatacgatctactcttcttctcgaatgagaagtttctggatcagggtgaggactacttggcgagatccaagtattttcaagtggatggctgtattattattgcgggggatgaggtcgagagcagcatattcgacctggatgccagcccgattccttgtatcggaatagatatcgagctaacaggacaaagctcctgttacatcatgtccgataacgataagatctcaaccaaagttgtagaacaattttatatgaacggttatcgagatgttggttttatcgggctggagcgcgcctctcttgtgatgcaacagagagagatggctttcaaacgttcactaaatcagtttagtcttgatgaaaagtccgagtgggttgtatacagcaaagattatgccgcagcggatggatacgaagcggccaagaaaatgctcgcctgcaagactctgccacgtgccgtgtttgcagccacagatctacttgcctttggagctattcgtgcctttaaggaagtggggttacgcattccagaagatatagctgtggcaggttgtgacgacatcgaagcctgtcgttataccgatccaccgctaacaaccgtcaagcaggatacggataaaattggacgccttgctgccatgattctgttcgatctgatgaacaaacaaatggataatcgttgcattaaagtagagccggaactggttgtgcgtcaatcctgtggcacagccatgctgctggcacaggaaatctgagcgttaagtctttgggactggctactgcagatcagctcacatcctgggcatagcgaatttttcatactatataaattgaactaaacatttacacgagaacgtagaggacagaaataacctgaagaagcggagcgttcgcctttatcaacagattttctcctttgtaaagccgaatataaaaaatctggggataacagcgatcagaaggttgttctgtcatcggagtggcaagtgtaaatattctttcgttcaatttatatagtccacaccaagaagcaaaaaggggatgtcccataagtcatgaatatgacgaggggacatcccttgtttgtgttattttgtttttaatgaacttgagacacgctattcgcttccatttgccgagaaagttcctgctatctggaagcggcagtaggcagcttgccctctactgtctgcaagtcagaccatccgggtcgatcaagttcaatgagacggcggtatcgctcttccccagccagcaattgttcgtgagaaccttgcatggcaatctttccattttccataaaaataagttcgtccatctgttccgcaccaatcaggtgatgggtgacccagatcatcgttttgccttgcaagttatccagaatggtgcgcatcaactctcgttccgtcaacggatcaagccctacggttggttcatccaatataataacaggtgtctcccgaagcagtacccgggccagagcgatccgttgcctttccccaccggagaaacgcaggcccgtctccagcattggcgtatcatatccctgcggcaaagattcgattagaccggataaccctacttgggcggccacctgacgaatctcctcatccgttgcatgtggacgaccaatccgcaaattattggctaccgtggtgtcgaacaggtgtgggctctgattcagcactgcgatgacatcagtgacactctcacccaaggtctgcacaggcatattattgatcagaactttccccgcagatggaagcaatgccccctgaatcagcttcaacaaggttgatttgccgccgccgcttcgtccaagaatagctaatcgtttgccttgtggcagatgaagggatacgtcctgtacggcgtaggaatcatccgctgcataacggtaacttacgcgattaatctcgatgtctgctctgagtttgggtggaatgcgaagacgaattcgtctgtccgggatatcattcgcagctggcaaggactcggatggctgtccagccatcacgttgccgttttttactacagagatcgattcgcccgttccatcagcatcaccaactccattctgcaacggaagataccctttcccttcgagctgtttcaagcgatccagtgattcccggtaatggggaagatgctccaccgcatcccctacaggcagaattgattccgtgagcggaaatagtaccaatacaaaagcagcaatcatcacggcaggcaattgcccgatagaagcggcatttccggcccataacgtaaccgataccaccagcaggccaatgacagactgagccatcagatcacgccagcgtgtccagcgccgcaacttgcgacgaatcgcgtcgacctgttcctccgcttcttcctgctgctgaacaaattcggccgctcgtccacttgcaagccaatctcccagtccaagtacaccgtcggtcagacgggtatacaacctgctgttttcctttttcagccgtacacgccatttccacgtcactttcagggagatcgcaggtaacacggcaacgagaaataacatatacaagcccatccacaccgcaaatcccagatcaacactgccaaaggcaatcacagccccaccgtacatcacaagtgcggtaacggcgggaaaaacggtgcgcagataaatatcctgcagccgctccacatcatcggcgagtgctccaagtacatccccggtctgcatacgagaacgcaggaacagggcctgtggctccagaatgcgatataatttcacccgttgatcagccaacacccgcagtacggcatcatgtcctgccaatcgctcgatatatcgaaacacggcgcggaatatcccaaatgcacgtacaccaacaatgggtacatacaccatcagaatattttcaggacgcagcgcagacttggagatcagaaatccggaggtaaacagcagcagtaccgcacacagtgcagcacaagtgcctagcgcaatgactgcgatgaatctccagcggtactgtgccacatacggagcaatccagctatttttttctttttcgttacggacggtctccatatgctcatatccggacttcattttatatcgcctccatctgggcctgaatcatctgataatatacgccttgtcttgccagtaactcctgatgtgttcccgtctctgccactgtgccgccatccatgacaataatccgatccatatgcggcatccaatgcagacgatgggtagccaaaaatacaagttttccttcaaacagcggcagcatcgtctgtttcagttcatactctgtctctacatccagatgagctgtcggttcatcaagcagcaggatgtttcgtttactaagcagggctcttgccagcgccacccgttgctcctgcccaccactgagctgtctgccaccagccccaataggctcatgcagcccaccggataatgaagacagtagcttggttaatccagctgcgctaatggccttcgccacttccgcatccgatgcctccggcatgtagaaacgaacgttatcggccaggcttccactgaaaatatacggatgctgcgggatagctgctgtctgtcttcgccaggattcaagcatatcctgtgtcacaggctgtccgttggctaatacttggcctgaagtaggcagctgaaatccagccaatacatcaatcaacgtggatttgcctgctccgctggcgccaataataccgattttgccaagacccgtgatctgaaatgtgacatcctttagcgaataaggaccttcatcatcatgccgtacctgtacatccgttagagccaatctgctattctcattccaagagaacactgaggaagaggaagaggaagaaacaagctcaggagtagtagaaacagaagcagaatcaggagcaagatgccccgcagccattttatcattcaacacgacacgtatggtcgaagtagcggctttccttttacccaaagacaatgatgcagatcccgtcccatcctctgccatgtccgcatgcgcaacaacatttgcataggcttctttttgtttctgttcagcagctttcccccgttcaatcacttggttgatagccgctccagcttccttaccgtccaatgtggcatgataatcagcgccgagcatacgtacaggcaggaaatattcgggtgccaagatcagtaccgtcagcgcagggccaagtagcatatgcccttctgtcagacgtaatcccagaccaactgctacggaagcaacggacaacatcgtaaagaaatcgagtgcaaacgaagaaagaaaagccatgcgcagagtagacatcgttgctttccgataccgctgactgacccgcaaaatggacccttcatgtgttttgctctgtcccaatgtttttagcgtttctagtccacgcaaggtatcaacaaaatggttagcgagtgctttgtaagatctgaattgtccgtctatcttacgctgagctgcgaggccaatcagaatcatgaacacgatcaggattgggagtgtcagcatcagaataaccccggacatcagatccagcttgaacacatacagcagaatgagaataggtgtgaatcctatgcccagcatacgaggaatgaatagttcgagatacgtcttgtattgagctgttccctcacgtgccagtgtgaccagatggcctgttccctccgtcttcgcataacgcggtccaagtctgaaccactgctccaccatctgtctgcgcagatcagtccctgtcttctccgcatatcgtgaagtcacgagttgtaaccagaaggatagggcgtagcgggcggcaaaagcagccaggaacagcagcagtacaggatactgctccgttacggatgaaccttcaaacaatgccgtgatggcctgtgccagccatttggcttgcataatgatcgtcatcgcctgtagcagcaccagcgctgaggccagcgcaagtaccggccggatgcccggcagcttcatcagcccccgtcccatatcagtactccaggtggtgctgctcgttcagacgtttgcggaagatataataactccagatctgatagccaagaacaaacggcagcaatgtgcaagctacaatggtcattactttcaatgaatacgcacccgatgcggcattgtatacagtcaggtcatacgccaccccaaaggaactcaccatcactcttgggaaaagtccgataaagaccgaggaaaaggcaattgcaatcactgcaccagtcataccaaaagcccagccttcacgcttctgacgaacaaagtatgccgcaagtgcaagcgaaactgcgccaagtacaaccatgatccaaagagcccagccgcgtaaggcgaacacatcggtcatgaaatacgtcattaacgcgtaaacagcgagtagtgcagccagcggcagcatcaatttttgcgctgtcttcaaggcacgctctctgagatcacctactgttcgtagtgatgcaaacagcaatccatgaaccagacacagtagcgttacgctcaagccgccaatcacggtgtacggattaacaatatcgaggaatcctgcacgcaattgcatctccccatcaatgggcagacctttcatcaacgtggcaaagaccactccgaacaggaaaggcaagagcgcgctggagaccacaatgatgatatcccatgttttgcgccagcgctgctgtttcattttactgcggaattcgaaggcaacaccgcggccaatcaaggcgagtaacaccaccacaagtggcaggtaaaaaccactgaacaacgtggcataccagtgcgggaaggcagcaaacattgctccccctgccgtaatcagccatacttcattaccatcccagaacggaccgattgagttaatcagggtccggcgttcacgatctgttttggcaataatgcctgtagacatccccacaccaaaatcaaaaccttccaaaaagaagaaaccaacaaacaatacggcaatcagcagaaaccacaactcacttagtgacaacggaataacctccatccacgccgaacggatcggccgattcatcgtgatcttctggcttctcgaccgcaaacggtcctgctttgatctcacgtacgaacaggtataccatcacgattccgagaaccgtatacgcagcggtaaaagcgatggtcgagaacaggatcattcctgcggatacgttcggcgagaccccggcttcggttgtcatatagccaaatactgtccatggctgtcttccaacctcggtcataatccaacctgacgtattggcgataaacggcagggagatggcgaacaccatcagacgcataaaccactttccagcgacctctagcttcttacgcatggctaggaatgtaccgtatagcgccaatgcaatcattaaaccacccgctgcgatcataatgcggaaactccagaatgttgtccgtaccggcgggatgtagtcccccggtccatacgtctgttcatactcagcttgaagctccttcatacctttgacactaccggagaacttgctgtaggacagataactgagcaatccagggattttgatctcacccgtactctcctgtttatccgggtcaataaaagcgaccaccgtccatggcgccggatcttctgtcgttgtccatgtgccctcacttgctgccatcttcatcggctgtgtctccaccagatattgcgcctggaagtgacccgagaatgcgacgccgaatgaagaaacaagagcgataatgatcgcaatattaaacgatttgcggaagatctccacatcctgctttttcatcaatttgtaggcactgatcccggttacgacgaaggcccctgtcatcaatgccccaaagactgtatgtgggaactcaacgagaagctgaccatttgtgatgagtgcaaagaaatcattcatctcggctcggccgttgttaatctcaaacccaacaggatgttgcataaatgaattggctgccagaatccacagcgcggacaggaatgtgccgacaaacaccagccagatgcaggccagatgcacttttttggacaaacgatcccacccgaatatccacaatccaataaatgtagactccataaaaaatgccagcagcgcttcaatagccagtggcgcaccgaacacgtcccccacaaaccgagagtactcggaccagttcatgccaaactggaattcttgcagaatacctgtgacaaccccgacggcaaagttaatcaggaacagcttgccccagaacttcgccatcgttttgtagatttccttacccttaacaacgtacaacgtctccatgattgcaaccaacagtacaagaccgatggatagcgggacaaaaaagaaatggaaaatcgttgtaagtgcatattggatacgcgataacataatcggatccataccgttaccccttctttctgttcacttcgcagtatgcgtatttggcattgaagctgcaccttcgctgtctgtccgccaaatacgttgatgaacgtattgtgccagattacctattttatacatgtgagaattatcacaatcttcgtctctagagcaaaaaaaagtgatcctggtcacacaaaagataaaattcagcctattatcacagcatgccaactgcatctattcatggaagatactcatgtttgggacggaatgcccatatgttagtctcaggcatatcatgcgaagtaccgtgagggctttacatatgaagtgaaagcatgaagcacatgcagagtgaagacgctccatattacagtcaaggtgaggtgaactattcatggaaaaacctgcaccactaccaggtgaagacaccgaagccagcctggataaggccagtacaacacagccccctgtccggtatgttctcttccctcgcaaaggaggctggtcatcctttccctatcccgatattgctgcactgctgtcgatcgagggagaggtctactatgtcagcagcctgacgcaaacagaagatgtgcctccggtcattaccgccatctccctccctgaggctgagcagctattgctggaacctcgcaccgtagccgtggtcgcccatccctactggctaatagctacggcttcgctggagcctgagctatgtattgccctgctccctgagcctgctggaaacgaagcagaatctccgctatgggagagcagtatttccaaactggtcggcatcgccgatctggtaggcacatcctccgaaacacgttatatgaagctgttattccaaggcgtacgtgctatctggctgggcggagaagaccctgcacctgcgggtacgatgcaaaaggatgatctcgaagtccctctccgggactacgaactgctcttcttgcatgcgctgcggcagatcctgtcaggcactccagatagcgtcaccctgcttcaatgcagtgtacgtgccgacttctaccgtcagctccgtgccaaagcaggtgcacatgagacgatatcctttttgctggcagcctatgagtacttgcttgaagatccgcgggccgtccattcgttgcaagaggccttcacccatgcggtcatgaatggtcgcagtgattgtgtggtctcccattatcgattcctgtctgccatccatgcccgggctggacagttggaggacgccctgcgggtgtatggaattagtgcagcagatgaacaagaacggcatcattatgaacagttatgtcgctggcttgaggcaggagaagatcaacttgtacgagcggaactactccgtatgaacgatgattacggaaatgccctgcgtatcctggacgaacttggcggagaaacggcgcgacattggaaattccgcatttaccaggagactggacgtgtggaagaagcactggctctggtgcatgcagtcgatattcaggatgatgccagtcgccgggattaccagcaattatccggcagtgcgctggcactgcgaggggaacgacacggggcagtccgacatttccttgagacagcactggaggatgaagatgcgctggtccggattgtcgagctggagctgttggatcatgctgtacagcaattgcttggggaggtgccatgatgctggacccaaagaagcgtagacaacagttgaatggaccaatggtgcacagggatatccgaaccgaaaccacttacacgccaacggaaacagtcgatcgaacacatacagacgcattgggaaatggcgatcacaccccggatcatgcacaaccaacgcaggacatccgaagccaagtgcatcactggaatgattcacaaggtcaggcagaacagaatgctgctgtaacacatgaggaaacaagtatattcaaagaacccttctccattcgtcgggttcgcaaaaacaaaggcaacaagctgaccgccatgctccaggttcgcaatgaacgtggccgataccttgaagaagtattgcatgatctgagtgagttcgtggatgagatcgtcattgtggacgatgccagcacagacggaacaccggacatatgcaaaacctatccaaaggtggtccgtctggaggtattggagaaaccactgttcgccgaggaatggcgacttcgcaacaccttgtggcaagcggctgcgggaacatgtcccgactggttgctctcagttgatgcggatgagctgtacagctcagaggccaagaaagccatacgcactttgattaatcaggagtatgcggactggtttgcattccgattctacgatatgtggggtggccggacccactaccgggaagatgatctctggtgtctgcataaacggcatactgcttcacttgtacggtatatgcctggatatccttatttttatccacaacagaatcatcatgttccccgccttcccttgtcctgcacggtattgcctggggtcagcacggaattgaaggttcagcatctcggatgggcaggcagcctggaggatcgggttcgtaaatatttgcgttacaagcgcattgatcctagcggtgagtggggcaatattgcacattacgagtctattctcgatccggaacctcggctgattccctggaaggagggaccgtgagatgggcgtggtgagtattctgacgcatagtttcaccgacgggtacaaccgggaattcggtcgtgtatttggtggtggactggagcgatatattctggatctgtgcagtgtcatccgaggactcgggcatattcccgaggttcatcagctctcttattttgaagcattccagactcggacggagcagattgacgtatttggttattcgtacgacatggataatgtaccggaagcctttgaccggatggcagcagcagcgcgcggcccagtgatctatgccagctgtctgtggcaacccatcacctacaaacccggcagtcttggcatctgtcacggcattaactgggatcgtcccggactgccactggagaccaaacaacaagtcgcggaacatattcaactggctctggatggactcgtgcgcattgtatccgtggattcccatttccagaccttttgccgggctgcgtgcacctataccgatccaaggcaggttgtcctgattcccaatgcggtggatacgtcctatttcacaccagctccaccaacgcgaaccttcgagcagaaacaggaagacgaatggcttgtcgcatggaagaatgatctggcgagtcatgaagaaaatgttggtgcagttatatcaggagtgcaagctgtagaaggcaaggatggaacgagtggtgctggagcgaacagtggtaaggctaacagagatggaggtggagatacagatagcgatcaagaacgagaggggaaagaaacggtagatctccatttacagttatcgaaacggggagaagtcgaggcagatggcgaaacgtataggtttgctcataatcaccggaattcaaaggattgggctacggagattctagtagaagcagatgctgagtatcaggttaatggtcccatccaaggacaggttgaaaagaaagctgtggatgctcctgcgccctctccccgtccaattcgcattatctatccacgccgcatcagcatggaacgaggcattattccgatgatgctggcagcagataagctattgggggcctttcccgatctggagattgaatttgccggggaactggtcgaaggcagtacggtggggagagcctttcgttattggcatcgtactcatccacatgcggagcgaatcattcagcgcacgtatgattttcgggatattcgtggggcctaccatcaggcagatatcgccgtaattccaaccgtgttctcggagggtacctcctatgcctgtctggaagcgatgagctgtggacttccggtaattgcctccaatgttggcggattgaatgatctgattcaggatggttttaatgggctactggtacctcctggcgagcaggaactaaccgtcgcactggtacgtcttgtacaggatcgggccgagcgagaacgactgggaatctatgcgcgcgagactgcactgtcctatgatcttgccaggtggcagagccggtggagcacggtgttggaatcttttttggcagagacaggattgaaggagggaattcggggatgatggatacgcccaaggcaacggaattcatggaatcaagatacattcggcaaagtgaccctaaaacggacacactggtcttcccgctgcatccggcatggtggagccgtccctacgaatatgaatgggcccggcggtttgcacgtccagatgatgtggtccttgatgcagcctgcggcatctcccatccgttcaaattctggcttgccgaacactgccgcgaggttcacgcctgtgactgggatgaacgcattttgtctgaagaggcgataagactggatattgtttctgattttggggagcaagccgctcaggatctgccggaatcaactctcgtccgattgcaccgtgcacaggctaatctggcccagcttccgtacgagtcgggtaagtttgatcgggtgttctgtatctctgtattggagcatctggatacgggcacgatgctgcgagcttttcgtgaattcgctcgggtgctgaaaccaaacggacagttgatcgccaccttcgatgtacccgagatgcggccggatctgctggagacaatcatggctgtcaccggattaaccattgaagataagctgaatgtgaaagagccagacgatgccatctggtctgatatgtacggcgcaccgatccgctgttttcgagcggtgatatgcaaaggttgagactgattgggttgcgttgagttaaatgcagaggggaaaattgagggcttaagggctcgacccattagcaacggaacaatacacggttcgggcaatgctccgattaccggtagctccgttgcttttgcaatttcaatcggatgggctagtgcgggaatatgtggggatgtacaggggttggaggttggggactagagactagaaataagagattagtgattaaagattagagattaaagattaaagattaaggattaaggattaaggattaaggattaaaggaaattataggtgtaccagtaacatgttgcactggttggtgtactctttggcataggctgcgccgggtgctgtcaggcgcaacagggtttgcaggcccggcgggattgtcttcgccgggcgacctgtagcggcaggttgccgcgcagtgagttgggccaactcggcccattcacgcgccaggttctgccgcccggcgagcagcgcgagcgtgcccgcgaggagcgcgtgagcggtgagctccgaggcggacacttcgtccgcgtggggctgctgcgtgccgtcaggcgtgccgcatagcgcaagcagcccttcgcggacgctcgcgggtgcgcgcagcaacccgcagcgtgccgcaggcggaagcgctgcgagcaacgccagcgcgccgcaaggcggcagggcttgcagcaggcgcagccatgcggcccaggcgcctacgccggcgagcgcttgcgcagccgcgagcatgccgctaggcgcgggcgcggctgggccgcatggcgttgcgccgcgggacgggccgcctggcgctgcgccgcggggcgggctgcacgccaggccgctgctgcgggccgtggccccgcgcagcagcagcgcctcggcggcgtgggccgcggcgggcagcgctgccgcatggcgagccgccgctcgggcgttgcgcccgccgggctgcttgtggcccagcgcccacagcgctagggccacctctggcccgtgctgcgcatgcgccgcccagggctgcaaagccgcccgagctgcggcgtcctcgcccagctgggccagcgcaagcccggcgaccagcggctgtgcccgcagcgggccagcaagcgccgccgcatggcgtagcagccaatccggccgatgcgcggcaagcgcggtcgggatcaacgcttgccatgccgcaggtggcaagcttacccgagcggcaacactggcgatggcatgcggccgccctgtcgctgcggccagtaacaacagccgctgccatgcagccatgctgccgggttgcatgctcagcgccgccgtgtacgcggtttctgcctctgcccggcggccagtccgctcatgcgccatgccttccagcgtcaggctacgataggtcccagcaccagagactgatgtatacctgctggccgtggaagcagctgatttagcttgttttaaccaattcaaggccacgtcctctctcccttgatcgagttcaagtacagcaccaaactccaacaaatccggaaaatcctcatacaggggcgcccatgcttccactacagcaagcgcccgttccgggctgccaatctctcgccaggcgtaagccgttttcagcaccagatccgagtgatatccacactccggcttaagctgtgccaataatggctgtaacaaacggagtgcttcatcatacttcgcttgctgaaaccattctgcggccagagcatataacaactccggttgatcgccctcctgattcaacgcggaacgaatcaactgcatattccgtgcgcctttatttttggtggtaatcacctgctccagatatccgtaatgaatgacttcaagtccagaatgaagcacaccttgcggagccagtgccatgatggaagaagcaatctcttcatgaattctgccctgaaaagcaattcggggatcatttcggaacaaacgaaccaccgcatccgtcacatgctcttcaccggacacacccagcagacttgtgacctgtatccagtatccccacacgtcatccctacttgccgctaataaccgcatgagttctgtcttcatctgaggggtctgtatccatacctcatccgcatcaagcaccagaatccacggtttcgtagcagcggccagtgacagattacgggcttcactgaaatctccgttccattccgtacgaattacaacggcaccatggagacgcgcaatttcagttgtatcatctatcgaacctgtgtctacaacgatgatctcatccacaacatccctgactgctttcaaacaccgctggagtgacaacgcttcatccttcacgatcatacacaaactaatccctatacccatattcatcaccacccctcaccaacggagttcagccccacccattagcccgctgaattaagttgaacccccgtacctgcctgatcccctctcagctctcaaacccgtccgctcccagcaactccagccgaatatgctgaacgacaggccaacaacggtgccgctgtccatctacatgctgagcgaacacctccagatgatgatccgcagcactgaccaatcctttcaccagccagcttgttcccgtcagggtatccgaagtcccagggaacgactcaatgtcactcaccctcccgttttcctttttcccttccatctctttctccttctctcccattcgaacgctctgttccaccgataatccttctccagccaattgctgtcgacacatctgaattaggctatgcagctctttccatctccctgactgtacacatccttccatcatcagtccaagcgcctgccagccatcatactctgctcctgcaaccgttccgtccatacctgagtccgtgtccttcttctttgtcgctctcagaccagcaattcgtcctgtcttcacatcaggttcttcattcgttccttcacccacctgcgaactaagcttcaaccacaaggttaatggatcatctccgttgacttccttgccttctatccactccaaacgttcgagccatcgtgcagacgagatcgtgagcatcccttttttccgttgcacaggttccaatttcagacgtgccttgttccatctcccctgttggatttggagcatcgcctccgccacagataaacgctccctcatctctgcggaaggttgtgaggatatacccggtaacaattgcaaagccgcatcataacaacgggattgctccagaatgcccaatactttgtgtgtagcctcttccgaactgagtgcaaaacgctccctcaccagctctggaatctgatgttcctgcccggagactcgcataattcggaatatccgatagagcggcggtaacagactcgatttggcacgtaccgcttccacgtaagcatctaccgcaccctccagatcggcccttccttccagtaatcgccctaacgtataccacgtctgataggtgccgatgccttcttccgtatgatatatgggtggaggtggccccatgcgaacagcttcacgcagcgaatattctgcccgatctgcatcacccaatgcgtctgcacataccccgcgatggtgcatcagatccgtgtactctggaaagagttcaagcgcagcatcgatgcgatctaatgcctcctgccagcgattcagatgctggagacaacgaacttcatatttgaacagcaaatgcgcgtaactggtcaccgcaggatcaatccccatccgagccacaccaaacgtctccaatgcccgctccgcttcccccacacgcagatactcgacacccagattataatgatggaacggttgatccggttcttcctccactgcctgttgcagcaggcgaacattacggttcaccttatctttgcgctccacaatcgccgtctgatacccataatgatggatgaccatgtccgtcacatgaaaagccgcctctggattcctacggcaaatcgccgccgcaatctgctcatgaatccgaccttcgaaccgatgctccggggcattacggaagagacgcaaaaccggattcacggtaaccccctgctgacccgtacctgtatagttatgaatgtttaaaaacaatccgtcacatccgctgaccgacgtccagctcctgatctgctcccgcgcagccctatcgagcgcctcgtccgcatcaagaaagagaatccagtcgccggaagcgcgctccaggccagcattccgtgctgcggcaaaatcttcgcaccactcaactcgcacaaccaccgctccatattgctgcgcaatctctgcgcttcggtccgatgaaccggtgtccaccacaataatttcgtccaccgctccctggacactggcaagacaatgaggcagcaactcttcctcatccttcacgatcatgcatagggaaattcgttccgctcgcaagctgattcctcctttcctttgcatggaaaagcgtacgccacggcataccatcggtcgttcgcagcctttgttccagtgcattatgttgtgcaacgagtacatctgaagacggagaacgaaccaattcctgccgaatcgcctccattgccaatcgcatgtaacatacagctgctccaactcgggcctgccacatatcaggctcccgctccagagcctgctcgaacagagacagcgcttgatcgttgtggccttttgcatacagcgtttcgcccagccagaataacccttcggcatccagctcactctcggtcatgcactggatcaggatgttcgcggctaccatggtatacccgtgacgatacagcagacttgcaaactttcgccttcgagttaaagtcgttccccattgatcacacatcatcatggcccgcaactcatgcagttgctcagcaagtgtgagctgtcctgtctttacggcttgctgcacaatcttctctgctaccatttctgcctgcggaccccattgaataagcttctgttcttgtgacgcaggttccatgcttcgcggctctttcgatagctgatccagcagtcgatccatgaccttccaaacgttcttttcttttggaagcgtagttgcgaggaacgcctcggataatcttaatccgttggcccaacaagccagtgcccaatccattctgtgctcagccagcagattgacttcatgcacaccccccacgctccagtgttcttctgccagttgcagcgcttcggaaaccctattcgcacataacatccaatgtatttgatccgctacatggatacgagcagtacacgaatctgcattcagcattttcaatgcctgttcatatgctccacagcctgttagaacatgaatcatttgcaccagatgatcctcatttgtcactgcatatgaatggggcatttcaccacgaatcaaatcaccgtgacccgatttctctattcctctgcttctggtaagtaatgtttctgctatgttctcatccgtttcaccggattgttgcagcacgtctgccaacccggcccatgccggagcatatgtgaacatgctgtccagagccagcccgtacagatgcgcagactctttatagaatccccgtttctgtgcaagtcttgccatcgcagtataggctctgtaactgttagaacccgcttccgttacatatgacgcgtctaacgtgctaccgccatcactgtgtccaacacggtctattccctcccgacagtccgttgctcgagcatacgattgatatgcacgctcctccaaaccttgcagctccaacgtctccccatacaacaggtgcagatcagcataagatggataacgctgtctttccacagccagaattgcatgcgcctcgtcgtaacgttccgaacctacaagggtctttgcataatctctaaccagtgtaggtcgatatggtgcgagcaactctgtcaggtgtaatgattcacggaacgcttcaattgcctgttcgacctcaccaagctggcaatacgttactcccaaattgtacaggtgaaaaggctgtgcaggctcatctgcgagttcccgctcaatcagtttcaaattacgtcttggcttatgctcttgcgcaatcgttgaagccaaatatccatcatgaaccagacatagtggagcaagcggttcagtttcgatcaattggttttgttcatctgtataggtctcgctcttattcatatcagcaacctgatctaggacaagcttgcttgggatacaacgaaccaactgctcatggacgcgtcccgaatatcgatacccctgatgagcacggaacagcctcaccggccgagagataacactctcttctaccccttcgccgtatcgattctctatggtaatacataatctcgaaatgcttttatggactttaggtaaataattcagcagttcttccaatccgtgcgtaacgtactcatcggcatccaaacacaggacccattccgtgcccgccagaggcaggctgatatttcgtgcatgggcaaagtcatcttcccaacaggcgtgcaacaccgttgctccgtataatctagcgatttcgggtgtacggtcagatgagccagtatcagtgataaaacattccgtgctgatatgcttcaagctgtcgagacagcggggcaggtgatgttcttcattttgcacaatcatatggattccaagtaaacggttcttcaaatccaaccacctccaatacaaaaaaagtacatgaagtccaccaaaggaactccatgtacctatatgacaaataaatgggttatgtgccttgtccattgaagaacacatcaatcgtgcttggtgcgccgattaggctggagcggtaggaaagacgcgtgtatttgagaaaacgctgcggtaccaatacatcgactgacccggacaaaatgcccgttaccgtcgtcacatccgtgtaccagttcgttccgttggcgctgatctcaacaagagcatctacccggtttacacccggcccccggttatatacaaagaaagaatacgtgccaaatacactggtcgtaaccgccgggagcgctgtgaaggtgtttgcggtcggggtgcttatgagttgggactcctggaaactcttctgtgaaatcgacgtcacactgctaagtgttcccgcggtaattgtagcacccagcacgctggtgattgtaccatttagcaggtttgtcaacgtacccgcagttaccgttgcgccaagtacgcttgtaatggttccgttcaataagtttgtcagtgttcctgcggtaatcgttgctcccaatacactcgtgatcgtaccattcagcaagttcgtcaacgttcctgcggtcaccgtggccccgagcacactggtaatggttccgttcaacaggttcgtcagtgttcctgctgtaattgtcgctccgagtatacctgtgatggtacctgctgtaatcgtggctccaagcacacttgtgatcgttccggcggtaatcgttgctcccaatacacttgtgatcgtaccattcagtaagtttgtgagtgttccggcggtcaccgtggccccgagcacactcgtgatcgttccggcggtaatcgttgctcccaatacacttgtaatcgtaccattcagcaagtttgtcagtgttcctgcggtcaccgtggccccgagcacactcgtgatcgttccggcggtaatcgttgctcccaatacacttgtaatcgtaccattcagcaagttcgtcagcgttccggcggtcaccgtggctccgagcacactcgtgattgtaccgttcaacaagtttgtcagcgttcctgctgttacggttgccccgagtacacttgtaatcgttcccgccgtgatcgttgctcccaatacactcgtgattgtaccattcagcaaattcgtcaatgtacctgctgttactgtggctccaagcacactgttgatcgtacctgccgtgatcgtcgctccaagtacactcgtgatcgttccgttcagaatgttggtaatggttccggcgttaattgtaaccgtggtcagacctgagatgttactgatggttccgtccaaaataatgccaaccacgttcccgcttgtatccgttctgacaggctgggctgtgcctgtactatcctggccaaaaatcaacgttctcagattatccggattcgtattaaacgttgtaaagttaggcatgtgcctcgtcctcctccctggtcaaatctgtgagatcttactcccttatggcatacgctgcgcctgaaagtaaacatcgagccgggtcggctgatccggttcaacggatcgaattgcaagccgggtatagtgcaaaaatcgcaatggtaccagcgctttggtctggcctcccgcgaccacctcctggctgtccacagcataatccacggcatttgggctgatctggatctgtacaagagccggatgttttccccgattcacaacgccataggtatacatgctgagtgatgaggtgtcttgtgccgggagtgaatccatgctgctactggtttcggctccgacatacgtatgctctgtaaaacaatgaatagcaccagggagtttcgtacgtgaggaagcaccctgcttgaaccggggacgagtaatccgggaacaagggggtttcagcaatttagcgcggcaggaatgacgggagcgacggcgactgacatatttagttggttgcttcgttctcttcttgctttgctttgctgttcgactcatctcgatttccccttaaaaaatgtgcttacgcatcgtatgcccggattggatatacgggcacggcaaccgccgttatttccagatatacggctcagtccccaatccatttgcttcttttcacatacactgcaagtacaatgaaatgcgaatcaagaggcacccttcgtaatcaaaagcggactttttgaacaacctctataagttaatctggtctatgggaggtggatgagatgaccaactataatgtattcaaccaatctaatcgtcccctgtttactcaattgaccaataccttctcagccccaggcattgaagcgtcaccagacagcggtgcagctgctgcaggcagtttttttgccctgacgaccaacaataccttaattccttccaaccagagtcttcttctacagatcctgaatgcggccggtagcggccgaacaatacgtatatccagcctcacaggaggcacaacagcggcagctactcttgttatctattcaggaggaaccgtgactgctggtagcacacccgtgcccgtcaatacgttacttggaaataccaacgccagtgtagttaccacaagacaaaatacaggtaccctggggggtgccttcacgagcattgcaagtattccgctcactgcaggaatgtattcattgggtctgaatggctccattattgttccaccgggacaaacattatccattagcgtaggcacggggaatcagaccgcagccattaatctattctggtgggaattctgagtttgatcctgataaaaggaggtgcacactgtgccaaacaataatgtattcaacccgttaagccagcccgtctatacgtccaacaccaacacgtatatttctcccggtattgttgcacctccagagaataatgctggcagtacaggcaatctgtacaacgcaggttccaccaactccacaacactaggattactgggaggaacggtgatcgccaccgtacaattagctaatcccgcagggagtgggaaaaccctatacgtatcgcggctctctggtggaattacggtctcactcaatctgttatcttccttcagcggttccatgagtctgagcgctaatggaacactgacatcgcccaccacactcacgccggtaaacagtaatctttccagcagcaataccagcgtagccacggtacggttctctgctgctacaccttcaggagcgaccccattgatggctatgccccttcaagcagggccgtttctgtccaatgaatttggccgttacgtggttcctccgggtcaagccattaacctctctgtcagcggatcactttcggttggtggactgatggcctccactgcttattttgcttggtgggaagtgtgattcgttcatcgatgtataacaaaggcaacgtgcaaatagccgccttcggatgagtaccgaaagcggctgttctttatattggagatgcaatgatgataaaaaatgttgtccgattcccgcacacacgaacaagtgttcccttgtcttaacccagcacgacacgatcatctgccatctttttgccgctaatccgttcgaattcaccaagcaactcaggtacagtcaacgtacgcttgcgctcttcgctgacatccagaataattcggcccttgtccatcatgatcagacggttacccagacgaatggcctgctccatattgtgcgtcaccatcaatgtagtcagtctcatctcacgcacaagtgtctctgttagttccgtgatcagttcggcacgtgaagggtcaagggctgccgtatgttcatccagtagcaaaatctgcggctgggtaaacgtagccatcaacagactgagtgcctgtcgttcaccgccagacaaaagccccacttttgcattgagacgcttctccagtccgattcccagcttctccagttgcgtgttgaaaatctcacgtctggcacgggtaactccgaagcccagtccgcgtcctttgccacgtttatatgccatcgccatattttcttcaatggacatatgtggtgctgtacctgccatcgggtcctgaaacacccggccaatccagctgctgcgtttatgctccggcagatttttaatggagcggtcattgatcagtacatcgcccatatccggcttcatcacacccgaaatgatgttcatcaacgtggatttaccggctccgttactgccaatcaccgtcacaaaatctcccggattcatcgtcagattcacgccaaccagcgcggtcttctcatccgttgtacctgggttgaacagcttggttacttgcgtaatctccagcatgatcacatacctcccttcgcctgatgacccccggatcgcatcaactcttctgttcgtttgcgagccagacttcgctgcttcatggagcgctgcatcgttgggaatacaagagcaataatgacgatcaccgcggtgatcaacttcagatcagatgtatcgaaccattcgacttgaagggcaagcgcgaccacaatccggtaaatgattgaaccaacgatcgctgcaagtgtagcccagaataccgttcttgcaccaagaatggcctcaccgataatcacggaagccagtccgataacgatcataccgatgcccatcgtgatgtccgcaaaacctgattgctgtgcaatgaatgcaccagacagtgcaaccaatccattggataagctgacacctacaatcgtagtcacatccgtatttgcaccaaagctgcgaatcatgcgtttgttatcacctgtcgcgcggagtgccagtccaacatctgttttcatgaacagatcgagcatgattttaaacaccagcaccacgatgataattagtaccatgacatgttcacccgagaatggattgtccatgcccataatggatttattcggtgcgccaagaatacgcatattaatggagtaaagcgcgatcatcatcaaaatcccggataacaatccgttgattttgcctttggtatgaagcagacctgtacaagccccggccaccatgccgccagccattgccgccaaacaggcgagccaaggagagaagtcattggagatcataaccgccgcgattgcgcctcctgttgtaaaacttccgtctacggtaaggtcaggaaaatcgagtatgcggaacgtaatatatacacccagtgccatcagtgcatataaaagccccagctcgattgctccttcaattgaattccagcttatactcacgctacttcctccctgtctatcgaaaagaatgaggcgaacccgttgcacgttcgcctcgcatccatactgccgaattacacttcggtcagattattgaatcaatctcataactcattaaatttatgaattgattctattgaataatgttgttttcctggtcttttacttcggctttcatctcatccgtaaccgtgatgccttgggcttcagctgctttcaggttcaggatcagatccagtttgtccggaacggtgactttcatatcaccaggattcgtaccatttttcagtatgtccgcggccatctcaccaacctgatatccatggtcataatatttgaagccaaccgttgcaaaagctcctttttcaacggtatcccgatcactggagaagaacggaattttattactgtttgccgtttggatgatcgtatcaaccgcactcacgacagaattatcaagtgtgatgtaaaaggcatctactttgccaacaagagaatccgttgcctgttttacttcagaggtattcgtaactggtgctttcaccagcttgatattatgtgttgcgagtgctttttctgcgttatctgccataaccaccgcatttggttcaccttcgttaatgaccaaacctactgttttcacatccggcagatttttggcgataaagtcagccaattgtacgatagcctctggattcgtgtccgatgcacctgtaacattgccgcccggcttgtccatatcggtcaccagtttggcacccagtgggtctgtcactgctgcgaacaacaatggcttgtccttcacttgttgagccagagccaacgcagatggtgttgcgatgccgagtacgagatcatttttggaatcacccgagattttctgtgcaatggacaggttgttcgttgaatcaccttgcgcattattgtaatcgattttaaggttcttgttctcttcaatacccgcatccttcagggctgcgatgaaaccttcgcgtgtagcatccagggatggatgttcaacaatctgggagatggcaatctggtatgatttttcctcgctgcctccacctgttgtactgcccgatccttcggattccgagcttgtaccgctgttatttccgcaacctgccgcaacgatcattgaagcaaccatcatcagtgacatccaaaatttctttttcatgtgtgagaacccctctccatcttataaaatgtggttacccttatcgagattccattggcacgatagggcgggacaaaacaaacgcttcaacgcattgttgctttgatcgacaaaagcagacaaatatagacttttctcatgcgactgaagtccatgacccgtgttggtgttttattgttcccctaatattaaggggcgtcccgatatccgtcaatggttgaaccgcttccaatttactttcatcgtatggttgtgatagaaaacattacataaagaaaaaaaagcaacccgcaagttatgcgaatggctcgtcaagaagctgtaatgtgcttaacgcttcacgttgaccagctgtaccaagccaacgtgttagcgccaaacaataaaattgccctttctccaatgctaacgaacccgagacatcttattgggggaataatcacgatatgcaaatcctaacgaacctcacactcgttattcattctaatattagaattcgataccgagaatcggccaaattaagcaaaatagcgcctttacgattcgttaaattttgaaaagatctttggagaggaaaatagcgtctacagggttcgttagagaaatttctttcatacagtttcacgtaacgcaggatataaaaaaagagatggcctcgacgaaactcgataccatctcttcttctttacactttgaatatcttttattattttttttcaaactctcgcccagttaattccccgacgcttcgcgaatctcatacttgcaccttttgccgccatcggcgtaacattctgtgcgctccacctcagcttgaagtagcgagcgaaacagttccagttcacagcggcaagcctgcttgtagacactcgcaacttgtacaatcgggcagttcatttccgtaatgacgtaagttccatcgtcttctctggacgcatccgccatatatccgttggcattctggattcgagcgagttcctccacccgtccagccagatcctggccctccatctgtggcaatccgctgcgaagcaacttgtcccggcgactctcgaacaatgcatctaccacaccgctcccggctgagtcagacaattcttcaagaagttccagcgtaagggacgaatatgattttggaaaaaagctgtccccgcgtaccgtcaattggtacaccgaggaaggacgtccggccgtagcccgggcctcccgaacctcaatccagccgtcctgctccagtgccgtcagatgacggcgaatggccatgccggtcagacccagatcagctgtcatttccctcgcggtcaatgtaccttgctgcttcagcatgaacaaaatccgttcacgcgtcgttcgttcctcttcgcgcttcacgatcagcacctgctctcctgcttatgcgtgtaccggtgctgcctcccggcaggcatccgagcaaaagcggttatgcgtctcttcgcaatcctcacagcttacatgctgcaggttgcaggttggacaattaatatatcggtcatgtgtcgttccacagtgataacagctggcaatgacaatatcctcttctgtccggttaatcggtacagagatccgctcgtcaaacacgtaacacttaccatcgaatagatggccttgtacttccggatctttaccgtacgtgacaataccgccgtccaattgagccacatcctggaatccttcattgatcatgaacccggtcagcttctcgcagcgaatgccgccagtgcaataggtaataatcgttttgtccttcatgtcacccaggttctcccgaatccactccggaaactcacggaacgactccacatctggacggatggccccgcggaaatgaccaatttcgtattcataatcattgcgaccatcgataacgataacgtcatcacgttgtagatgttcatggaactctttcggcgaaaggcgtttgccgctagtcacatttgggtcaagttcatcttccacacggaaggttaccagctctgctttgtgacgaacaaagatttttttgaacgcatgctcctcgacatcatcaatcttgaacaccatgtcgctgaatagcggattagccagcatatctttcatgtactgttccgtctgttcaggcgtaccggatacggtaccgttgatgccttcggatgcgatcagaatacggcctttcacacccaggtccttacagtattgtagatgctcttgtgtaaacgtctcggggtcttcaatcttcacgaacttataatataaaagcacgcggtacgcgctgttacacatgtatatcacctgttcctattccatgttgttattagccggatcatccggcaagacgactacgttgcacccttactgttaaaaagaaaataaacagccgcccgaaacatcgtctcgaactgctgcctgacattcgacttttattcctgcattctagtttatcggaagcggaacagcttagtcaatataaatgtatagaaaggcatgaaagatatggaacatatctttctgcaccattcaccctattccgagatcgtaatgaccgaggttacaaagtaatacgattcattctccaataccgcctgcgataacaggattttatttcctttcgggctccaggcgagtgggtcagaagcgttgtccatatcggccgagatctggaactgttctgccgactccgtgttggagacaaacagccctttctcattatcattctcggaattgatcgtatacgcaatcttggaatcatcacccgaccagcttgtgccgaagatctgcgtgcctctggcgagcgtggctttttcattgccttccagatcggtgagcaccagcgcccgtttggtatccgccgttcttttcacaatcgcaagccttgttccatcattagaaggaatgacccactccacacttttcagcacctgtttctcttcaccggtcttcgtgtcgtatgcgttcagctggccgtcttcacccgtaatataatagagcgttccgttcgaaacctcgatgctccgtacattgaaattgcctgtctccaccagcactttcgttgtaccatccacacttgccgagatcagatcacccttcatattggggaaaacgacatgttcattatccagccatgcgccttcttggataaatccatcctcctcgccagcaggggttgtctccccgttatgcaggttcaggaagtagcctttgcccgtattttcctccggctcgcggtagaacaggtactgaccatccgatgataccagcggtgcacccagactggcttcactttctttgagcggcgtgtctgtacctttcgtcagatcatacatatataagttatgcgggtatctttcctgaccttcaaccgtgacgggtttcaaggacttgttctctttgtcggatacaatccaatcatcacttagccatgcgatcccgcgcatattcggcaatttatcaattttctccagcttgaagctctggtacacggacgtgttggtattatcttttaccgtaatatccgtgcccgttttcccgccttgtgcgttgccccccggctccgttgttcccccgcatgccgctgtcgttaacagggcaatggctccgaacgtgcccatagctgcttgtttccaattcatgatggtcccccctggtttctcttgctatagaccaagcatacacatcgcatacttccaaagttattcagacttgtttcgaacttgtaaacttgaatcagccaaagggaacatgagctggaacgtcacaccttccccatcttctggatcactcaacagcagggtgattgtaccgccctgtttttcaacaaactgcttcacgagagatagccccagtccggttcctccggtttttctggctctgtctttgttcacggtgtaaaagggttcaaaaatcttctcctgtgcctctgccggaatcggcgtacccgagttgtagatgcgaatgaccgcttgacgctcctgcatccgcagttcattcttcacccggatcacaccatccggaacgttatatttaatggcattatccagcatattgatgaaaatatgcataagactctcccgatcgctgcggatcaccgccggttcaagatccagttccatgttcagcccaaatttctcggctttcccccgcatccggccacaggcatccttcagtagagcgctgacctctacatcttcggcctggttctcgaagtcatacttctccagagcagataaatgtaagactttctcgaccatctcgtacagccgctccgtttctttgccaatgttacttgtggcatcatcaagcagttgcggatcatccttatacatgtcgagcagctccacataagctttgatcgatgtcagcggtgtcttgaactcatggctgatgttaccgatatattgtttctgttgctgttccagcgcctgaagtttctcaatcgccagttgcagcttctgctgctccgcatgcatggctgtgatattttgctgaatggatgtactcatataataaatgccctgccccagctcccccaactcatccttgcgctttaaaggagactccgtaatgtaattcccttcgcgaatggaatctgcggactttttcagccgagtaatcgcaacggcaaaccgattgtagaacagataacctaatatgaagctcagcgcaacaacgacaatgcccgcccatatgaacaattgaaggatgcgagtatagaattcatggtagctctggaccggatattgcatccatacggcacccatctgcccatccggaccgtccagtggtgcggcatagagcaaggtatccccttgttcatgataggcaattttattttgcagtgcatagttgagcgtatcctgaacaatcgcactctccccggaactgatcgatgagccaacttgctggcccttcatattatagagagcaattggcaatccggtagagttggccagttcctgtgcaagcctgcggccgttttgttgtaaaaagacttcctgttccagatgaacggactccgtgtagtaggactgtcgcacattcagattcaccagccgtgtctgctgtgataaaataccttcaatctgtgactgctgattgcgttcaataccgcgcaggaccagtgaactaagcaccaccacggtaaggataagcaaggctgccagaaaaacactgaacttcagcttgatgctgactctcatatggccccgcctgtttcaggtgcagatgctttgtagccaatcccgtatacggtctgtaatttttgctgatccgtatctccaatttttttacgcaaacgctggatgtgaatgtctacggttcgtgtaccacccgcatattccatgccccacacccaatctagcagatcgtctcgtgtgtacacacgctcgggattggacatgagaatggtcagcaggtcaaactcttttggtgtcagatccagcttctcctcattcacggtcaccgtgcggtgagcaacatgaatacgcagtgtgccattcacgatggcctgattcttcgaatcgtcaggtggtggactgcttttctcgacacggcgcatgagcgctttcacccttgcaagcagttcacggatctcgaacggtttggtcatgtaatcatcggcgcccatttccaggccaacgattttgtccacgatatcatttttgacggtcagcaaaataatgccgatatcctcgcggtcctccagcctgcggcatacgccgtatccatcaagccttggcatcatcacgtccagaatcatgacctgtgggtgaaacgatgcgaccttaaccaaggcctcttcgccgtcactcgcagtatctacttcatatccttcgcgccgcagcgcgtaagcaatggcactgacgatacttgattcgtcatctaccacgagcacttttttattcatgggattcatcctctacgttacacgagataacttcaaatgcagtaccgtcttctgatcgctgttatccccagatttctttaatccccttcttccaaaggggaaatccggtgataaagggcgtagcatatgcttccgaagtagctttctgacagaaagctttgaacttcgtttcttcagactggttctgcactcttcgttttcgtgtaaatattcagttcttttttatttatgttagcaaggtctttgcgatttagctatggatgagtttgcaatttgtatgagaagctttcatcctctcagcttggacttggctctactttctttataccccaatgacgacaaaaagagccaacccgtgattggatcagcccttaatctatagattcccgtttcatgttactgtttaggcaataacttcttaatttcatcttcagagagtccagatgctttaactatagcagagagatctacgccaagtgtgagtaactcacgagccatttctctcttgccttccaacttacccttggctgctccttcagctcgtgcgccttcaatcattgatttttcgtcactcaatgctttcatccgagcatcgtaggccattctggtggacgcatcctgactcagaaattccagcgtatccatcgcctttttcaacatcggttcattcatggccagcacctcccagtttgatgtatctattcctttaaggaataataaccaattcacgagtccgcctttttccatcggaacagaatactcatccaatttggttagttccatcacatgtatttcgatatcatccgtcaaaccaatacctgtatgatcttctcgtaaatgaaaaacattgtgatatcgctcattatccagacaggagtagttgagtatattaatagtcacgcattttttgagtagactatagttttcacccttttttatctgatgaaagtacatctcactccaataaaacaacgtccttttctccatgttatacgggttaaacagctgcatttcaatgttaattagtttgccttctaacgtctttgctttaatatccagaatggattgtttatcctctggactatccttatctgtatacgtgttaaccacagtgatctccgtaagaggagattcgccggtctctataaacgtgctgttcagaaaagctaacaaaacatctttgttttgctcacttccaaaaatgcgtttgaacacaaaatctactcgtggatcgagtaattccgtcactcagcatcagctccattctcaccagcattatatcataattcccatatagcctcagcttgataatggatctgcacttaaattgcatttactcctcaaatgacagattcagcggctcgtccgacatctcgtactctgtctccatatgtgtcagtggtgtgttcagatcaacctcctcgaagcggaagctgtcgacccacacttttcctttgccgttcaaaataaccccgaatgaaatgaccgcgctaccctccggtacatcaagcacaatactatactgattccatggctgcgtacccgtaattggccgatcatgcatgttatcaaattgaagtacatcatgcacgttattatccacacgcatccataatccgcagaacgcatccacatgctcggtcttcacgaatcccgataacttcatccgcttacccacatacttgtccgctctgaactgttgcatcattgttgcgaactcgttaggctccatcggcgtaacggccttcaaatatcctgaagcttttccctgatgcacttcagccggatcaatgcccatctcataattctgcgggtgacttccggttaacatccaacctgtaattgttgacgtctgattcatctgtaattctcctcctctggttcttccttcgaataatttcagatcaaacaatttgcgaaaacgtcctggtggcatgccatataatttgcggaatgcacgggtgaaggcttcctgactctcaaaaccacaagccagcgcgatatccaaaatgcccgcatccgtcgatcggagggtggtggacgccagactcatccgacggtttcggatataatccaccacggtcatgcccacctcattacggaaaattcgatggtagtgatacggcgacaacaacgcctcggatgccacttcttccagtccaatctgctcatgcagatgagtctcaatatagaacaaactttgctgaatcattgcacgataacggctcaactgaggtaaagcccccttccatatccttactatacgtgaaggatgtcatcgccgttttgatcatttttgctatctttatttctgcttacctctgccggagatgcaaaaagagtcaatcacggattgaatcctgtccgtaattgactcttctgggaaactgctgccctgtggctactctagagccacttcattgatctacagcaggttcattttatctattcgtcagacagctggtaccggctgtgcaccaacctcttcttcatcatgctccacaaggtcatgcttctcccaggcacgacttttccagcggaagtacataatgaccgcgcgggtccactcatccgccgcaatggcaagccatacaccagcgagccccagatgaagcttgaatatgagcaggtatcccagaggcagactcatgcagaccatggagatcagacccatgtataccgggaactttgcatcccctgccgcacgcagggaaccaatgatcacaatattgcaggtacgcccggtttcgagcaaaagactgagcagaatcacttgagcccccagcttgataatttccggattatccgtaaatatgctcatcagcggcacacggaaaaaaatgatgattacatcaatgataaccgtggccagaagggcccattttacactgtcaaaaacacgtttgtacgcatcgtctttgcgccgcgcaccgacaagccgacctacaatgatcgatgtccccataccaatcgccatgctgaacaagtagatatagctggagatattacccgcatactgcttggttgccatagcttctgcgcccagataggtcacatacagcgtgaacacgagctggcaggaatgatataccatcgattccatcgcagacggaataccaatccgcagaattttgccaatgaatttcttggacaacttaatgtagtattcaaaatccacccgtacctcgctcacacgatacaacaaccagaagaagatcagcaggcagataaaacggcttcccaccgtggagattgctgccccttccaccccaagcttcggcaggccgaagtgtccaaagatcaatgcatagttaccaacaacgtgaatcacgttcatgaatacagcaacatacatcgtttctttggtgtaaccatgtgtacgaatcgtcgcagccagcgcattaatgagcgcctgaaggaagataccgccaccaacgatatttatatacgaacgggcaaaatcataaatttcgccttgaatgttcagaagtgataacaaatgtcctccgaacagaaggaagattccgctcaggaccagacctacgataagattcagtgtgatcgcattacccgtaacttgtgctgcttcacttaactttttggatccgatatattgtgcgactacaatcgcagcaccatgtccaatgacttccaatacaaggatagcgatagaaataatctgattggctgctccaacgccggagaccgcattatcggacaccgagctgagcatgagcgtatccacgctccccatcaacataaataagaagagttccaggaaaataggccatgtcagtcgaatcagattcagatccttggcatcagaacgaagggactctttggttgaggatattgctgtcattttctcacctttcccatgtgggctttaattcttagggtatgttagcacaggtggtttgaaaatgcagcagttttgcgaaaatagttgaaagttttttgtaattccataaataggtattttcactgctttcatatagcccatcttccgtacgcctgccagaggttttagaagacaaaaaaggtccttcccaactcgcttttgagcaagtaatggaaggaccttaaaccctcagccttttaacctttaacagaacccgcagcaattccctccacgattcggttactcaagataagaaaagcaatcaggattggcataatgctaatcatcagcgttgcaccaatggctccccaatccgttgtgtattgaccgataaagttctgtacaccaacagtcagggttttgtacgaatctgtgctgatgaacgtattaacaaagatgaattcattccagttatagatcatgttgatgatcgccgttgtggaaatgaccgaagacgtcattggcagcacaatccgaaagaaaatccgatgcacggagcaaccatccatcactgcggcttcttccacttctcggggaagcgcgtagtagaatccgagtagaatcataatggtaattggcatattaaaggcaatataagacaggatgactgacaaaggatgatcggtgagatgaagcttcaggaacaagctgaacagcgggatcaacgtggagtgtacagggatcatcagacccaccatgaacagccccagcaccagcgaacgacccttccagcgcatacgtgtaatggcaaaggtcaccagactggcgaacagcacggtgatcaccaccgagaccaccgtaatccatacactgttgaagaagtacaagctgatatttccctctgtccataccttgacatagttttcccaacgcggagtcgcaggaagggaaaaaggcgccatgtcgaatacttcctgattatttttaagcgagaacaacagtagccataccaaaggtaaaatttgcagcaaagctaccagggacaagaggaaatacagcagaatatatccgaatctccttaaccatgccgaacctcggcttgtccccgggtaagttggcaatctaacagccgtatccgtcttcaccgggatggacctcctttcatttcactagggcgtgtctggaaactccgaaggtggcagattttgccgaattttcgttccaagcaaggaaattttccgcaggcgtgccggggcacgtcaagggaaagtgacgcagcagggggcgaaaaggcggtaaaagatgcacttcagcgagttttcagacacgaactagcgtcaggaatactggatcgtatctttggatgctgtcgctttacgaagcagccaggtaacaagcagacagatcaagagcaggaagaaccctacagcactgccgtaaccaaagtcgaagctacggaacgcctgacgatacatataggaggccatcacttcgctggagccatttggtccgccatcggtcatcacgtagatgagatcaaaatacttgagtgagcctaccacagccagtaccacagtcaccttgatgacttctgtaataaggggcagcttgattcgaaaagcgatctgccaagggcttgctccatcaatccgggctgcttccaccagagattccggaatatttttgagggccgcataatagatcaaaatatagaagcctgcatactgccatagaatcggcacgaacagtgcatacaacaccagggatggctccgccagccaggctggcggattgctgaagccgatcgcttccagaaaggtgtttagcacaccattgctgggatgatagatcttcagccataactgggcgatcgcgaccgaagacagcagcatcgggatcaaatatattttacggaacagattggcccccttgatcttgcctgacagcaccaaagcgatcatgagataaccgatcagactcagcgcggagaacagagcaagcaaaaaggtatgattcgcactctgccagaatgtcccgtcttgaagcagtctggcgtaattatccaatccaataaaggtcattgcaccgatcccgtcccattgcatcaacccataatatccggtgagcacgatcgggatgtaaaccaagaccagcagcagaagcagtgcaggaagcacgtacaacgcagcaacgagacggttggacatgactttgtccatcacattatcctcccttcaagcgttcaaacgtgtgtacgtcaattgcctttatcaattgcagcctgatgattctttacaaagtcctccggtgttaccgctttgccaaacaacgcctgaatcatgtcaagatgggcctgagcggctgccggtttcatctgtacatctgcaaagagtgtaaggctgctggcctgattcaattcgttcagcaggtcaatatagagctgtggcaactgtactgccgccgtatctactttggttgccgggatgacgcctgcctcagttaccgaactttcaccccatttttccacaaagtattgcacaaacttctgcgcttcttccttcactttggagttctgggcaacgaacaaccctacgcctggaccacctacccagctgttaatgtcgctcttgccatcttccattgttgggaatttgaaaaatccgatcttgtccttaaattcctgcgggatgtccgggttagtcgtgaagtttggcagttcccaggtacccatcaggtacatggcagctttttcgttcatgaattcggatttaccctcatcgttagacaacccgttgaaacctttgttgaaggcattcatatccaccagtttttgtacctcggcagcagcttgagtcagcgcaggatcatcaaacttgccagagccattgatcgccttttccagtgcatctccacctaaccgattcgccagatacatataccagagtgagccggtccagcggtctttattgcccagtgcgatcggaacctcaccgttctctgtcaatgtcttcagcacactcaggaattcatcgtacgttgctggcggctgcaagttatatttcgcaaaaatggctttgttataataaatgggggagatattcaactcgattggtaacgcatatgttttgccgtctatggcataagcttctgttgttccggctatgaatttctcgcccagagagtcactcagcagatcatcgaccggtgcgaacaggttccccttcacataaggctccagaaatccagcagcccaagttacaccaacatcgggaagttcattggatgccgacaggattttcaatttattcttatattgttcattctccagcacttcctgcttaatggttacattcggatgatccgtctgatactgcttgatgatatcgttgaccagtttgttttgctgtgcggaactgcctgctggccagaggtgcataaatttgagggttactttcccatctgtgccgttgctgcctgtttcaccctcttcatccgaacttgaactgttacatccggataaaattacggcgagaaccagcgtccatgacagaagaatggccatcgtctttttgctcattattccaacccccttggttttatcggttaatgtaaccgctttaaccaaattgtagcacgcgcctatcacacctataagaccagaacaatttggaaaaactccacttttttgaggttatttgttatttcgttcagatagggaatgccgatatttgcttggacttagcccctcaaggcttttaaatactgtgataaaatacttatccgtctgataacccacctgttccgcaatctccgagattggcatcgttgtctgcacaagcaactccttcgcgcgctgaatgcgtttgcgggtaaggtattcactaaaattgatgccgatctgttccttaaacaatacgctgaagtaactggagtttagatggagtagatcagcgatttcacgcatggtcacatgttcacccagatgagcatccacataggtcaaagcttcactgatctggctattgagcctctgttctccgcgctccttaacatccagcagcttcgggtcaaccatttcttgcatcgtttgaatacgtcgctgttgttcgctgaactttagggctttttcgacggtctgcagcaattgtcccttatcaatcggtttcaacatatactccacaacacccaacttaatggcctgctgggcgtattgaaaatcggcatgtcccgacataatcaggacaacaggcttgttcgaaaaatgttgaatggcttcaatcagagacaagccagagaattccggcatgcgaacatccgttattaacagatctgccggctttttcttgagccattccacagcctcgacgccactttctgcagtctgaatgtgatttcgtcctgccgaccatccttccagtgttttgcgaataccctctcttgtacgcggctcatcatcaacgataagaatcgttttgtcatgaatcatgtgcaccctccgtttccttgggaatctcaaagcaaatgacagttccttgcccaaccttacttgttatggaaagcctgcaacgttcgccaagttggctgccaaagtaaagcttcagtcgccgatgtacgttgattaaacctacgcctgtacccttgttagatacagcgggcccgccatgtaaagcatgaatgacagattgaagccgtaattcatccataccgggaccatcatcccgaacctcaatgcgaaccagatttttctcggtcgaagcatccacatggacgcttatctttcccgggcccagtttactttcaaccccatgaagaatcgcattttcaactaagggctgtataagcagtttcggtattgcgaccttacgcaccgcatcactcagctgaatctcccattgcattctctctcccaaccgcatctgcataatttgaagataacgctcggcgtgttccagctcgtcggcaatcgtaacccattcatcctgctgcgaactggagatgatgtagcgaaataatcgggacatcgccaccaccatacgtgccatctcctcgtctcccttctcctcaagggaccaatagaacgcttccagcgtgttgaatagaaaatggggattaatctgagattgcaacgccttcaactcggcccgggactgcatgacctccttctcatgaaccacacgggtcaattcattctgcctgtagaccatctggttatatacgtcgttgagttcattgatctccatcgtagagctaaccattagattaggtctcattgctcccggctgtgcactgcgcatggccctcatcagacgtatgagcggacgtgtaatcattgtggacagaaagaaggacatgataaggaacagaacaacaccaatcattcccgaaacgagcagcgccgttctcaagatggatacaccttccgttgtctcccgcagcggggtcaggacagcaagtgtccatcccgttaactccgatttttgccggacgacgatataggattcctccccgttctgcacgactgatccactgtccaatatggctttgggatcgagattgatctccagatcggaagtcaccacttcgcccaccccatccaagagcatgatagagtcctgcgaaccatctgccccattcgaatcattgagttgaaaaaaactgcgctgcatccgcaccaccacataacctccatgttcaaaagaatgatccaggaggttaatccgtcgaatagctagaagcacacccggatcttcagggtcagcacctgcccataccagtctgccttttccttcatccgccaggttgatccagttgcgctccactctgagatcgagggatcggtcatccatcggaaagatgcggttataacccgtggtgtatatctccatactctgcgctccgttgatgaaagactgataactgcctgcaatctgcaagagagcttggcgctgattaaaggttgccgggttgccttgcttctcatcgctaagcagacgctgcacgtatgaatcatccgccacttgggcggtcagcgaattcacttgtgcaatgagtgcatccaatctgccactggcttggacggcggtttggtgaatatgtttctccgcattgcttttcagcaaagcagctacccgatcataagccgttatgcctgcgagcagcagaacaacaagcatcaccataacaaaaccaatgaagatctgattgcgaagtgagttaaaatgtccttttttcccgtgcaacttccccattctcctctctttttggcatgtaaaagaacccaccaccttacgcccgtgctcttgaagactgggtacaaacgatgccggatttatctacgattcagtttttctcgttaaagcgcttgcataattgaaccttaattttcttctcactatctttgtttaccgattaaactaacgactaaaaaatagcatagttttacaggttaatcaatcctcccgaagagttctcaaacgttaaatgacaaggatcaaaaaaagagaggggacttttaaagtccacctctctttgttcatattccttcacatttgtccattccttttacatctatctttttcttccccacacaacttcagttatttcacggacccttgggtaaccccgttgatgatccacttctgtgcaaacaggtagatgataatcatcggaagcaacgcgagcaggtaggatgcaaacgcaaggttaaattcagtattaaactgtccttggaatacatactgtaccagcggcagcgtgtactgtcctggatcactgataataatgagtggcagcaagaagtcgttgtacgtggacagacaagtcagaataccaaccgtggcactgatgggtgccatgagagggaaaatgattttccagaacgtgccccaggttgtcgccccatccacaaatgccgcttcctccagcgctaccggaatggaacggatgtatccaacgtacacaaatacgttaaatgccaggccatataccgtgtgcagcaagatcagacctaccagatttgtcatctctagcgatgctgtcagcttaacaatcggcagcatgatgattggaaatgggatgaacatcgcactgacgaagtaataatagagtcctttgaaaaacttgcgtttctccatattccgcgcaatcgcataggccaccatcgagttactgagcaacgtcaagagcacagttgatgcggtaacgattgcactgttacggaacgattggaagaagtttgtcatgtcgatggctctcgcgaaattctcccagtgaagtgtcgtcggaatggcaaagaccgattgggccatctgttccggatttttcaaagctattgtaacggtcatatacaatgggaacaggataaacagggtacccagcacaacgagcagcataacgagccaattgattcgtgtacgacctctcattacagatccatctcccttctttgcaggaaccggatttgcagaattgaaatcaccgcaataacgatgaagtaaataaccgagttcgcagattgatatgcatattcgccgccttcaaatcctccggtgtagatcagatgggagatggactgcgtcgcccgtccgggaccaccgttggtcaaggctacgatttggtcgaagaccataagcgagtttttcatcgcaagcaccatattaatggtgaagaaaggtgcaatcagcgggaatgtaatactccagaattcacgccatttgcctgcaccgtcgaggttggatgcctcgtatagtgtcgttggtatcgtttgcagaccagccaaatacagaatcgtattcagggccacggattgccatactgcaacaatgacgataccaatccaagccagactctcgctgccaagaatgttggtggatagcgcgttgatgcccagattttgtccccagatcgggaatacgttggagaacaggtagttaaatatgtaacctacgatcagcacactcagaatattgggcaggaagtagatgccgcggaaaaagttacggaacttgatcttggcattcagcccgagtgcaatgagcaggcttaggatattggtcaggatcgtcaccacgatcgcgaacttgaacgtaaaccagtaggcattacctacattgtcatcctggaacaagttgaaatagtttttgaaaccaacaaaatcatattctttcccgaatccgttataattcgtaaatgaataatagatgccctggagggccggcagcgtcataaatacaaagaacaatacaaccgccggaaccgtcatccagtaatagggtgcgatacgcttgttcatactccatcctccttctgacaaggcttagcgccgattagcaaccttgtcccattctttgtcgagtgtatctagatagttgtcgatgttttggttctgcaaaaaggactgaacgatggaattcagctgcaccgcagccggaatatagtgatcgggaaagtcaataaccttgccctgctcgatatatggcatcaattcctgtacggcaggatcatcctgcttcacaccttctaccgcagagaacagcgtctgttcgtcaatatatcttccgatattttcaggctctaatagaaacgcaataaacgtctctgcctgctcgcgattaggcgtgtccgccgcaatggtaaacagggagtcgatcccgttcaccagcttgatctcgctggcatcgttacccgtagggaatgggaaaaaaccgatatccacatttggattcgctttgcgaatctccgagatggcccaggttccctggatgtacataaaggcttcaccgttggcaaaagcacggttaccgtccgaataagctttaccaaagttatcgccgtgaccgtacttcatgagttccagctgcttctcggctacctcgcggtacttctctttgaacgtcactttgttatctcgccgctcttggtagaaatcaataccaaccagattggaggctagtgcattgaacggcaggctcgtctgccagtcatccttgtatgtgaaataaaatggaatctcacctgcatccttaatcttttgggcggtcgcaatgagttcatcccacgtcttgggcacgtccaatcccatttccttaaacagcgttttgttgtacatgatgccgtttgcattagtcgcgtaaggaatacctgtcacttcgtccatgcctgtgagatccttcagcatttgtatgtagttcggatcaatcgtctggagtaatgagctgtccgtcagatcggtgaaaatatcactctgggccagaatggaataggtgtcggttgcacccatggccataatatccggtatatcatttttgactacacgcgtttttaagaccgtctccgcatctggcggattcacctgggtcacctgaatatcgttatgctccgcgttgaacgtcttgatcaattcatcaaaggttgttttggcttcaggcttgttctggaaaaattcaatctgcactttgccattcgcgctatctccactggtacaggaagataaaagtacagccatcattccacacagcaacattgtcccgagagccttggtaagcgttgttctcatgttgtacctccctcagcttaataaattgaactaatgtgatttacacagtgtcactccgattgcagtaccatcttccgatcgttgttatccccagatttttttgattcccttcctcaaagggaaaatccggtttttagcgtatgctttcgaattagctttctttcagaaagcttttagctgcgcttcttcagattggttctgcactctccgtgttcgtgtatatcttagtttcactttatatacgtaaagatttacccatccaaatggtgaaataaccatttggttaatccttccaaaccgacttcaatctgaatggatgatatacgtctttattatttctaaaacggtttcgataaaaatgaatcaaggcagttcttcccatgacccgaattgggcataacaaaaaggacactggataatatccaatgtccctcattcaataagcttatattcagccactgtaacgcttttatccaacctattacgaacgttctgctttcggcaaagcattacgtaaacgcttggcccgataactctgatatgcacgaatcaacatgccgatgatgatcatgaccacaccgatattaattgcgatatcagcgagattcaaaatcccgcgtcctgacggaaatacgaggaaatccgttacccgggcatagataaatcgatcgattgcatttcccaacgccccgccaaccataaaacccgcgccagcttgcatccagaaaccacgaatctcacctttactccggtaatacagcatgcccgctatgaacagaacagcaatcacaccgaacagacgcgcatttccctgaaacatgctgccagccattccactgttctcgtaatgctgtaactgcatgcccgagttacccagtctcatgacgtcgccaacttccatatacatcctcactgcaatcttggttccctggtccactaaagtcaccagcagtgctacaaaataaaacagcatcgtgcttctcctcctgcctacgtagcaataacttatttaaactttaagagttatgtatattaggttcccttcactttaccacagccgatgtatggtctccaaatgaacggtctttaaccacgcaaataacgtccactaacatcgttcagactgcatccagaagggactacaccaatccatgtcgaatgtagacatcaatcatatacgtaaaggggatgcctgtaatttgaacctgaccatgacagagaaattaaaggaaatgcaacaggaagaaaaggacttggtatttggcacatttaattctgaaatggcacttaaccttggcctgcatctggtcgaagaagcgaagcatcgttcccaagccgtgaccatcgacattactctgaaggggcatcgcctctttttgcatgcgatggaaggcactcatcccgacaacgaagactggattcgccgcaaaaacaacgtggtgaatcatttctcatccagctcttggcacacggctctgcgcctgaaaaacgaggaccaaacgcttgagcaggatttcaacctgcctgcatctgactatgttctggctggtggcgctttcccgcttattctggaaaatgagggacaggtcggcaccattacagtatcgggtttgcctgatgaggaagaccatgatctggtcacgacaggcatccgctcgtttttgttgcagcaaggttagattaaaatgagcaaaaaaatccgtacctgggataggcacggattttcttctttttcctgtagttaaattcctgcgtttattggatcgctgagagaacatccagcagcatggatttgaacttgggccgatcaatcgcctcacagacacgtacattcggctctttgccaaaacgtccgttgatatcaaccacactgtatccacgcgtcagctctcctgcggcttccacatccacataatactgacccgacttggtcatgatggattcatctgccgctacagccatcaacaatgtatcgggatgagttgtgccattgagtttatgtaccgacttgttgaactgcataaccactttgttgattgcagtgaagaaatcggcacccgatgtacccagagccgcaatctctgcatgatcgtcatcgtccatcactgaatattgcgtgcacatctcccagccaaccatcgtaatcggaatacctgcatgcagtacaattttcgctgcttccgggtccacgtagaagttatactccgccgccggtgtaatattgcccagtgcattattcgttccgcccatgatgtacaggtgagcaatctccggaataatcgttgggtctttctggatcgccatcgcaatattggtcagcggggcaatcgccagaagttcaatttcacctggatgtgcatgcaccttctcaatgataaaatcaaccgcatgcccgctctcgggacgctgatctgccttcgggaaatgcgcgccgcccataccatcatcgccatgcacatcttccactgtccggtgctgagctttaccgtaggccattagcggacgttcgcaacctttatacacaggtaccttgccgccatgtccagcaacctgtaccgtgtacagggcattttcaacctcttggtcgaattgtacgttaccgcccgtaatggtgatgccctccacctgaaagtgatgcaatgctgtcaggatcgcaatcgtatcgtctcctgctgtatctgtatcgatgatgactcttctcatgatgccgcgctccttcttccgtttaatagtaaactccataaaacactatgtcttattttacatcaaaaacgtaccaatgacgatggaaacgccgatgataatcgaacgcagcagctgggctaccgccatattacctcgtgcaatttcgtcacacacccgcatttttggaatcaggaaatcaaatataatatagaccaggcacagcacaataattccaaacgccgaccacagcagcatatccaaccacgaatgcgtcgagaaagataccatgcccacaataatacacagtcccagtaatttgctgcccatgtacatgcctgccgcctcgttacctttggcgatctcctcactatcgttataccgggtcaatttgctaaaagcgaaatatccacataccaataccaccagcagaatgcctacacccaccgccacattcacgaggtttaatcccaagttttccattccttctcctcctcatctttcatccgttcacgtactgtagccgcgcaataataggccatatctccagttactttctccccgacccgtggtaacaacccagccaaacgcccaccgataacaaacacccctgtaagcagataaccgctgtacgctccatcttccgtctcgatcacggcctgttccatcggcaccagctgctgatagattttgggctgattttcgtaataagctgtaatctcttcatcctcgtctgttgctgcagttgcaagattggattccagcgtctcgttaagatgatgctccatatccttctttccagggacattgttcgttcctccatccagcaaaagagttcctctgccttcgcgcccccagtagcttttggctacatatgatatggcgttcagctcgaagggctcagatgaaaaataggtgggtagcagatatcgggaaatcacgtccatctctgcttcatcaaagagggtaaacccgcaatattccggggtttgctcgttacgctcgtaaagtgaccagattgctgccatgaagcctttgctctgcatcagcacatgctgaacgggattcatcaggcccaatcttccctcacgtacaagttcaagcagcgcagcaccaatgtccacccctgtcgtctcatcccgatcatcgatcagatactccagcggataaaggcgatacagcaagttaatctcccgccccctatggtaaagcgcctctcccggaacaatctccagttcctcaagtggagcatagaaaacttcgtatcccgcttcctgacaacgtctcatcaggtattccgtatttgttcgatcttcgacatgttcgccaaaagaagtgaatgtcaccggaccctttaatccctgctctgtatagaattccagccacatcttgaaacattcccgaatacgtgtatccatctcggcagatggcgcagttaacgcggcatcctcagcaagaccgaccaggatattttccaatgcagcagcctccggtatgccagtaggcgtgtccgtattattttcaatacacttcggcccagcttctccaataatccagtcctgacgggtaatgcctccagtcaccatctccatgcgtgccgccggaataagcccgggatggatacccagctgatgctccaaaaaagaatccggcatgtattgctggataaatcgcatcactttacagtaaatgccgtctaccgcctcggctgccgcacgcagctcctgcatctccgagggagaatagaccgtcaatgcaggcacacaatattgcttcccgtacattcgatgatatggaatctgttgttccgtttcaccctgaaatacctcttcgtgactaaacggcagttgaaccacttgcctcatccggttatcctcccgagctacggaagaagctaccgaagccgcttgatttggacttggatttgctataggagctgttactgtccttattgcttcgatacgacgacccaccgtagtaatagtgcccactgctggaatcatattcacatccggtatcatactccgggtcacattcatcattgttgctaccacaaccggataacacggcaggaaccgccagcatcagggagaaagcaaccagctttgcttttgatccaggttttgatgcttgcccccgctcttggtcactcatcacagatccacctctttcatataaaacaacactttcttgcgatccgcatccagcacggaatacaggaactcatacgtcttgccaccgcgaaccatgtaatggtccagcagttgctcggcaagctccattgtataggtggatgaagctgtgagctccaactcctgaaacgaacttccattccacaacatatactctgcgctgtacatggaagacattttgcacatcgccagcgcagcatccgcaatggctgcaccgtactcgtccggcatctgttggtcatatggcgttacatatactgcatgttcccgcccatcctggcattcattggacagatgcgcccagagtttgtttttcaccaaggtggcatccaccagtttgcgcatgaacagttcatctcgtgtgactgaagcctgttccagcactcccgtctccgcctgtcgatcatccgaccaactccgatacgtcaatgaataatagataccgataacctccctttttgcgagctcttaggtgagccgtttcaattcatacaaacgtatttaacgcatcagaaggaaaaaagttacactagtgaatcaatttcatagtacctttagctgcttcaaatcaaggctagacatagatcaaaatggtttaatttgtatatgtctagttacaaaactccatttttaatgagttatgaaattgattctattcaccatgacatgtaataaagaacatgttggctaccttcgttctccgattaacgaagcaggaaataacatactgttttctacttttggtatgtaatccagttcaaaaaggccggagaagactctccgaccgcactttttttaatcttatgctcatgccattctgacttataactcagcccactgtgccaatacatcattatattcagcggacaattgctcacgttcattccagatttgttccagttcaagcggattgttctgcaccatttccaactgttgatccagcacctgaatctgtgcctcaagacgagccaacgtctgttccagcttatccgcagactgtttattgccgttgctacttctatgattcgatgcgtttgctgccgaaggagtcaacgtcttgcttgatcctgtggaagcttcatgatcatgacttccatcgggaaccgcaacagttaaaccgttcaatgtcgaggttgcttctggtttcttccctgatctggcagtcccgccgggcgcagacgttaaccctgacttcatctctgacttggcgttcccacgagaagaaacgcccacgcctgctgtagcctgagttgtcgccgccgcacgagcttgcaaatcaagcttcttctcacgatacgcctcatagtctcccagataagcggtcatctgtccgtcctccagttcccagacacgggaagcaaggcgattgacgaagtaccgatcatgcgagatggcaagtacggttccttcaaaatcaaccagcgactcttccagcgcttctctcgatgcgatatccagatggttggttggctcatcgagcaacagtacattaggtttacgttgcaccagaagagctagccgcagacgcgtccattccccgccagataattgcccgacagagcggaatacatccgctccatagaacaaatatcgtgccagaattccgcgagcctctccctcttccacgcctgcttccagacggaagtattcgagtacattcagctttggattcgtaggttcctcctgttgagccagatacccgacatccacacgcgccccccactccagcttgcccgcattgggctgctcgtcaccaagcaacagcttgaacagtgtcgtcttgccggagccattgcggccaatgagtgcaattttatctccatattccagcagacccgagaccccgtgcaggatttcacgctcaccatagctcttctcgacctgttccaataccgctacccgtttacccgttcgatccgtaggacgcacatcgaactcggcatttcggcgctccagtacaggacgcttcacctgttccatccgctcgatggctttacgcatagaagccgcccgtctgaagaacttttcattcccaccaactcggccccactcctctaactggcggatcgtttccttcattttcttgataaccttctgctgctccttgaactcctcgaattgctgcaacagtcgttgttccttcactttcatatattccgtataaccgccagcagatgtttccgcttctccatcctccagctccagtgttcgattcacgactcgatccaaaaaatagcgatcatgcgagatcaggacaatggtgccgggatattctcgtaaaaatccttccagccactcaacccgctccagatcaagatggtttgtcggctcatccagcaataacaggtcgggtcttacgattagctgtgaagccagcaccacccgagtctgctccccaccagacagggaaccaaagcgccaaccatagtgtgccttggcgatatccaaaccgtccgccacctgatcgatccgggcatccatttcatatccaccctcacgctcgaactggtcttgcagtgcagcgtagcgtttcagcaggcgctccaattgattagggtctgctgcacatgccggatcggacatctgttgctccatttccttcatttgcgtgcgacatatcataagctccttgagtccaagactcagtacatccactacggtatggtcatccaatccttctggaacctgagccacatatcccattcgtgtatctttcttgatcatcaattgcccttcatccggcttgttcagtcttgccatcaggcgcataagtgtggtcttgccgcttccgttgcggccgatcagggcgaccttgtcgccctccataatttcaaatgtaatgccgtccagcaccagatgtgctccgtggtattgagtcagttgttgcgcgctaatcattatcataataaggttcctcctatggtatggaagatcctgaccgcaacacaaaaagagccgcaggaggttagctccgcggcccttcagaattcaagcaatatcgcttatcgtccgaatgaggtcaaggcaggcatcttctcgcaaatgttaacttccgtatattcaaaattggacagacttctcccgttggtcagaaaagtatgaacaatgccagccatagcaatcggcagctggctaatacggttgttaagcatctcgtgattcacctgtcttcacctcccttgtcataattaatgtcaatatatcacagacgaatgcgtttccgcaaccatcccttcgcccaattcaatcatactgtacagtagtttcattcttacgcttaattcctgccccgtcgccgaagcattacatccctgattgccaccgtaataagtgttaacattcccgaggtacccagtgatgcgccgagcagggcatatccgatgccgttccatccgccaatatcgatgctgatcatgattacaacggcaccgccaagcaaggccacacatggcaatatatattgtacccacgtcattcgtcgtccttgcaatcggtaaataagccattcaatcagcagctgtaccgcccacattcccaatgtccacaagatcagtacttccataaggttcccctcctgttgttggatggattaagccctttgttacagacctttcgttacttcaaccaatccgagaaaaagtgtcggtacccttctttcatcttcgtgcgcgaaaaagcaccaaaagcatactcccggttgtcttctgacacactacgaggcgcagccgcagccatattaaccagttcaaaccagttatcctcattgcctgcaaatgcatgcgtggatcgaatatgaccgtagcaagcatgctccggtttcacgaccattttgcccatcgccatcgcttccgtcagcggcatcgcaaacgtatcaaaggccgaacagttccaatataccttggatgagttcatcaacgtaaatatctcatcctgcgtgagcgcaaacttcagcttcacgttggcaggaatgtcgtacttcttcatggtttccttatagcgtacaccgccaaacaccatatatacttccttgtccggattctgccgagcatattccagaactagatccgggcgacggttcgcctcatcccgaccgatccagagcacccgattatgcacaacctggctcggatcatagtgccggttcgccagctcttcgctaaagccaatcggaataacgttcacgtcatgtacaccgaaattgcgacccagttctgttttcaaaaactccgtctgtacaatcgctttatccaccatcgtataaaatggcttcatcatctcatatcccattagcgcgggatcgggaaaactgtgcgggaacaatacactcttcggtaagaacatctttaaaaacgtaaacccggatacggtgtagatgacatgttctatattttggctatgaatctggtccagcacgatatcgtagttcaccaggtcacctttctcatgctcataacccggcaaccagtcgtatccgctgacatgacgctccggcgagatgaacacaatatccacgcccagctccagaccaatctgcttcagccgatccgcaaatacgcgtggcccctgtgcttccgtgaattgaattttacgcataacaagtccgactttacgcaagcttctcacccctcatttctattcctcatccaagtgcttcatgcactgttccagcgttgctgccgtctcatgccactggttacgcaactgttccttcggccacacacattccttactcctcagatcaccgtcaatcaaacgcagcatccagagtgagaatacaatagcataagcgtcgtaccattctgcaaaagaaacccgttcaatctgtacgcccaagctccccagtttgtccaaataaacatccataaccctctctcgcaatgcaggtgtaaccgttctgggaaacagcggatgcgagagatcaactaggtgatatatatcccacagtggcgtattcagatgggcatgctcccagtccaagatgaccagtctgctgtccacctccgccatgttacctggatgcaggtctccgtgacacaaaacagtaggaagttcttcctctgccgtgaggatcaacctagtgatcttatcccaatcggatggagatagctgcatatccaatctggataacagttcatcggtagattgcctatgcatttgcaactcatccaacattgtgcgaatggacggtttctggcccacgcgaggcagctcactccaatccgtaacaggcaatgcatgccacgccgccatctgtaccgctacaccgagcatcgtcgcttcttgcaaatcatgcaccagttgccccagatcctcgtagatcatccagctctttgctggagcaatggtaagatccgacgctgcaatgagttgcggatagattggaggtagaccagacatcacacgctcgtacatccatcgttcccgtccatgctgtacaggattcgtcaacggtttgaaaatataactttcaccgctaggaacagtgaatcgctccacatatcgtccgttcattcctttatacaactgttcacggcttgttatatagtgatcattcagcattccttcgggcgtcacccagctgtatgcatccaactcttcgttcacgctacccaccatccatttcgttctccctgctactccgatgttgatttctattcatcatacgttgccgctcacaagcctgcaagctttggtcgtaagcgcttattcagtgtctcaattcagagtttcaaaattgcttattgcattttagttagtaatcacttactatacaatcatgaagaacaaatctcatgtggatagcaaaaagaaagatattctacaagcggcgatgcgcttgttcgcaaccaaaggcgttgacggcatatccgtcaaagagatcggtgacgccgccggagtaaccgatgcggcgatctacaaacattttaaaaacaaagatgccgttgccctggaagccttcacccaatactgtgtcgactatactgcactcattgatgggtatgttcgacaggaaggtccggtgttggaacgcttcaagcaactggttaccgaggttctccatctgcatgatgaagatccctacggactgctgctgatttcacagaatcatgaaatattcattgaagccggaagcagcgaggattaccgtcagccattggatgcgttaatggatctgatcgatcagggaatgatgcggggcgaactgcctcagcaggattctcggctcacagccgtgctggtgatcggtgcaattacacgtatggcggtctccagtatgcaaggtgaactaccggagctgttggtaccttatacgggggaaacggttcacagacttgcatcgatgttagggcaggtaccccaggagtaacaatggagatgggatgaagctagaaatggattagcggagcgtagggaaaacgacgtgagcaactacattgtttccgaaggaaacaaccttcgtaagtttccgcttatctcagctgaatcccatattcgatgcggatgatgccgctagacatgattcgtaaacaaaagtggacttgttgaataacttctaaagagaatcgtcagcataccattaggatatacagatggattaccgggtcatacgtgaccttttctttttgcacatgaggttagtgttcattaactaaaatagtcaggacgtgtcatcttccatgaagaaaatactaattattcaaggcaatcccgtctcccccagttacaacggcgcactagccgaggcttaccgtaaaggtgctgtgcaggctggtgctgacgtccgcatgatcaccctgaacgagttggcgttcaacatgaatctggagggaggatatcgtaataaacttccacttgaaccagatttgctacaggcccaagaagcgattaagtgggctgagcatcttgtatgggtattcccaatctggtggggaggaccgcctgccctgttgaaaggtttcgttgaccgaatcttcatgccaggttacgccttcaagtatcaaaaaggaaaacctttcccggatcaactgctcaaaggccgcaccgctcgcatgatcaccacgatggatggtccgagctggtacttcaaatggttccaaggtgagcctgcacataaaatgatgaaaatctccacatttgcactgactggcatcaaacctgtgcggataacaactgtagatcaagttggtaaaaagtcagatgaacagagaaagaattggcttgataagattgagcagcttgggcggaagatggggtaaacactcttctgcaagaaaatctcatcggaagtataggattctctccggattttcacgttgttagttaaatcaaagagctggggataaacgcaattcgaaggtagtcctgtaatccacgagtggcgcaattgtaattatagtctgacttataacagaaagcagaaatgtgcctattcccagttacaaaaaaagggttgtcccctacgtcttgaacaagacgtaggggacaacccttttagtattcattatgatctaacgaaccgtaaacacgttattagcgccatttccgataagtctgaggtttaacgaatcgtagacgcgttatttcctcgatctgtgtatcatttaatgattttaaactagtttgcaccggaataacttcactgaggttcgttacattttgcattgcacgctaaatcgccatttaacactgactcggttcgtaagcgacctgcacttagagagacaaatctgcactacaggtcagcttgatacgccaatcgcccgcctttggaaagtcgacttcgcatcagtaatgcaatggaaacgaccatggttagcgccccaatgaacagccatctacaaatacaaacaacgcattacctaaacgaaatacgacctgatggatgctcaggcaaaatagctgtaaccagctgctgcacagcaggatgatccgacttcatcaccgaatccccagcatcaccgctatagacaatcctgccctgatccatcacggcaatgcggtcacagatcgtcatggcagctcgaatgtcgtgtgtgataaaaaggtaagacaacccgtaggatgctcttaactctcccagtaaggataggatttgcgtctggtgcaccatatccaggctgctgattgattcgtccagtacgattaactttggcttgagcgcgatggctcgtgcgatgttaattcgctgtaattggccaccgctgaactggtgcggaagcttatttgcatcctcaggtgtaagtccaacctgctcaagcagttgttcaaccacacgaagttgttcttttgccgacaaacgctcgtaattatccagcggctccccaatgatctgcgcggcagtcataagcggattcacagccgaataacagtcctggaacacgacctgcagatcacgccgtaatcccttgagcactggtttgctagatcggtagatatcctgaccttgaaataaaacctgaccctggctgggcttctccagaccaagaatgattttgcccaaggtacttttacctgccccgctcgtacccaggagccccagacacacacccttttcaatcgtaagtgagatgtctgccagcacaggaggacgcgctcccgaacgatccagccagttgcgtttgccatagctatggcttatttcacgtacctgaagcatcaggtcaccctcctcttttgtacttggcataagcaatctccgaagaagctgaaattacacatcaccatgcccattccacccctacgactacccactcaaaatacagttcatacccgctctacgcatacattcactaacgattcaactcatctgtcattcgctattgtcctaaatacatactgggtctggcatttaacaacatccgtgtatactcatgctgcgggtgatcgaacagttggtacacatccgcctgctccacaattcgccccttctgcatgaccgctacttcatctgccatctgcgagatcacacccagatcgtgagagatgagcaagatggatgtgccatactccgtacgtagccgatccaattcctgaagcaccttgaactgattcacgacatccagtgccgtcgttggttcatcagcaataaccaaagccggtcgcaggcacatcgatatggcgatcatcacacgctgcaacataccgccactcagttggaagggatatcgcttcatcagtttagctggttcgggtaagttcatatctgccaaggcagcaatggcccgctccctggcagctgctttggacattcccgaatgcgtacgcaaagtttcaatgaattgagatccaatcgtatatacgggtgtaaaagcattcatcggattctgcataataaatccgatgtccttgccgcggatgcgccgcatctcctcacctgacaacgagccaagctcccgtccattcaggtggatgctgcccgacacttccatcctgcgcggatcaagcagatggagcaacgcgttacatgtaacggtcttaccactgccactctcaccgacgagaccgaagacacgacctttttttaattcaaaatcaatgggctccagtaacgggactgagccctccgctgttcttagattcacttgcagaccacgaacttcgagtaccttcgctgcatcatccatcgttacgttcacctccatatgcctttggttccgaaccactacctttttgctataccataacgctcggataacgcttcacctaagatgttgaacgtaataactaccagtaaaatcaaggcacctggatagatcatcaactccggatgactgcgaatataacccgttccttcatgaatcatggcgccccattctgcattcggtggttgaataccgagtcccaggaaggacagagcagatatatccataattgcccaccccatctccagcgtacccatcacaacgatcggacgctgcacgttggggatgatatgtctgcggataatcgtccacgaagaggagccactaatccgcgccgctgcgatgaagttccgttctttcagactaacgaccatgttccggcagatacgtgcataatacacccactgtaccatcatgagtgctagaagcacctgcatcaaacctggaccaaagatccctacaataccgagcaccagcaccagattcggaaacgccataatgccttcacacaagcgcatcagcagactgtccacccagccaccaaggtaaccggagattgaacctacaatgacaccaatgagcaaagatgacaggaagatcagggtagcaaatccaagcgacactctcgctccatacatcagcctagtgagattgtcacgtcccagatgatccgttccgagccaatgctcaagcgatggactcgccagcttctgcaacagattcaccttcaccgggtcatgaggtgcaatccatggggctaataacgcgatcacgaagaaaagcaatatgatcaccgagcatatctggatggctctctgccctttaaataccacacgccatttgtttatcaatgttctgcccgtcctttcgctgaaatccgtgggtccataacgagctgcaccagatcaacgagcagattgcatacgatgaacaggcaggccgccaggaagacataacattgaataacgggaatatcccgattaaatatcgcatcgacaaaataacgtccgaacccaggccaggaaaacacctgctctacaataatggtgcctgtgagcagcttgcccatactcatccccattcctgtaataaggggcgatatggcgattttcaggacatgcttgagcataatcactctttcgcgaatcccgcgtgttctcgcatactgtacatatgtctcctgcaattgctccagtacactggaacgcaacaatcgggtgtagaccgcaataagaatcaaggagagagtaatcgtaggcagaaccagattctcccacgatccacgcccctccacaggtagccagtccagcttcaccgagaaaaagaagatcagcaagtaaccgagccagaattgcggaatagatgctccaaaataggaaatcgcacggctgaccatgtcaatccagctattcttatacaccgcggccagtattcccaatggaatactcaccaaagcggataacaacatactccagaaggctagttcagccgtagcgggaagccttagtttcacttcatcccatacgggtttgttggtgagatatgaggtgccaaagtcgagcttggcaatcttctgaatcgtatgcacatactgggttaataaaggctgatccagaccgaactcatgccgcttttgcgcaagcagctccggtgttggatagatatgagcggctgtcagataagcctcggccggatcaactggtgaaatatgaataagcgcaaaggtaacgagtgtagcgataaaaacgataggaatgatcgcgatcattcgtttcccgatataactgatcaacaaacttcctcccttttatcaagctacatgaccttgccaaggctttaccactccgaaattaaagtaaatacaacttattggttgcccaattcaatgcctacgaacggattttcatcacggtttgccgggaaaataaagttggaaattttcttctgatataccgccgttttcttaacatacgagatggggacaatcgccgattgttcctgaagtgttgtcaggatagagccatacagctcctgacgtttcgtctcatctgttgatgatagtgcggcatgtacctgctcgtccagttcctttttcatcggcaaggcactgagcgtctcagagataccaaatccagggctcgctacaacgttaatgaaggaatgtggatcatacggagcaccatagttgtaccagaaatacaggtcgaaatcattggctttcaaacgtttgatctgtaccgtcagttccagcccagtgaggtttaccttaaccccaagctcgctccattccgcctgaatggtctcagccatcgctttctgaatcgggtccgtcttgtcaaaaatcatttcgaattcaagctgttggccgtctttctcacgaacgctaccattcgcaggcatcttccaacccgcttcatccaataaagctttggattgttccacgttatattcgatcggtttcaggtcaacattggtgtatgggtagtttttggatagtgccgtatctgccggttcttccagacccagagtgatgccttccaccatcgcttttttgttaaatccttgctggagcgccatccgtactctgagatcagacagcttcggattggaggaattcagcagcagatctcgcgtacctaccggatcagacagctgactcacatatttatcgttgtcacgaagctgttggaacgcatccagactgatcataccttcaccatagatcaggtcgagatcacctttttcaaaagcaagcacgcgggtttctgcatcagggatgatcttaaccgtaatctgatccaccttcggtgcggttccccaataattcgggttgcgtttgaaaacagcatattcgtcctgcttgtaatcagccagcatccacgggcccgttccaactggctctttgatgccttgggatgtatctccgtcatccgggaatccggcttcacccaggaagcggaaaggacgaaccacagacaaatcctgaagaacaggatagtacggctctgtgagtgtcatacggaacgtatggtcgtccacaacctccgtcttgtcgagcacacctacaatgcccagccagctatgtgtagctttatttttcatcacagcgtcaaaattctttttcacaatctcagcattaaatggcgtaccatctgagaatttcacaccttggcgaagcttgaatgtatatactttgccgtcatcggagatggtccatgattctgccagcgcaggttccagttttccgtccttctggtaactgatcagtggctcatagagcatcgattgggcaaataattgcgaaggattgtacgtgtgcggattcattgtaccgatatcacgtggccatgacatcgtaatcgacttcgtagatgtttgatccgaagcagcagatgaggattcatctccacttcctgtattgctgcaacccacaataacgagtagcaacaagagcatagttgccagcgtgagggccgaagatttgcgatgttgtacagacatggatgttgaaccccttttctctattttatgataatgattatcatattcatccattaagaataggcaggagacctccttttgtcaatataattcgacattgtatgtgttgttattaaaatagccaaaaaagcccttcctataggaggaagagcctctcgacctgaatatgaatcacaactgcaaaaataagttccacaataatctgctattccttgctcacagcatggaaatcacgaaagtacatatgcagatatattactataatccatcttcacatacgccttcttgtttctcgtttaaacttctacagcgatgctctcatagaaccgacgaatcaccttctccgctggcttaccatacaccccgtatccgtcatcggtcagtgcatccttctcgtcatgtaaatgtgcactccagtcccacagaccaaatccgcgtacccagtcacgctgactgacatgccggaacatggcctcatagaaacgctcctgttcctcagcactcacttcgccttccagtccccaatcgtttggtacctgggcagatccgctacggctgggacagcctgcttccgcgaagaaaaagggtttaccatagggagcaatcgcctgttcaatacgatccagttgcgcctcccaatctccgatgggataataaccactggaagagatgacatcaacggcatcccaccatttcacatgaccttcctgatatttgtccgtgttgtatgacaccagtcccgtgtacacttcacgcacaccggcgatcacctcgcgccactcttgatcccgacgctcggattgcaccatctcacagcctacgatgaacatctcacacttttcctgctctgcaatcactgcataatgcttctgaaatgctgtatagctgcggaaccaatccttccacttcggctcataaggcacatcgatatcaaaaaagttaatatgtgcacgccatgtgccatcggtgcagttgacggtgggtttcagaatgacacgcagcccgagtgtacgggcataacgaatcatgtccaccagttcatcatcctccaccagatgtgtaccccgatacttgacctctaccgcctgcggatgatcctgatgtgccgccagtgcaaaaataacatgagaactgcctgtacgttctgccatcaggcgcaaagattctttggcctccggctttcggaagtcacccttgccactcatccagccaaatgtaaatcccttgatataatccatatgcattacagcttgccttcctcatggtctccagcgatgacttcgtccgtttcgatcacatagttcacgatctcttcgatggtcgtgtaagccacgccaacatacgtgtcggcagcgccgtaatagatagcgatacgtccggtatcagcatcatgtagtgttgcacacgggaagatgacgttatcaacgaagccttgttcttcgtaccatttttccggtgtcagtacaaagttggaggaacgatattttactttggacggttcatccagatccagaatgaccgcccccatgctatagacaaaaccattacaggtcccagtgacgccatggtagaacatcagccagccttcggacgtttcgatcggagcaggcccgccaccaattttgaccgattgccaccagccttggccgcccttgctcatcacatgacgatgcttgccccaatacacgagatccgggctttcactcaggaaaatgtccccgaatggcgtgtgtccactgtcacttggtctggacaacattacatagttatcgttgtttttgcgtgggaataacacgccattacggttaaacggcagcattggattttcgaggcggacaaatgttttgaagtcatctgttttggccaggcccagtgctgcgccgtagaagtctgtacaccagatgatgtaatatgtgtcttcgactttgaccaaacgtggatcgtacgcatagttcggcataaacggatcgccattttcatctacaaatgcaatgcgttcttcttttattgtccactccagaccatcttcgcttgcgcccatgtgaaggtgtggacgtccattaacggtttcggcgcggaataccccaatgaattttccttcatacggtacaacggcactgttaaaaatgcgggcaacacctttgaccgggttacgcggaaccaccgggttggccgaatgtctccataccgggccttccgttccctccggtttgttctcccaaggcatattcggcaaagcatccccaacaatgtgtacgtttttcgtttcagcaactgacatttttcattctcccttcggttaggctttatgaaatgaatacttaaaattgcactagaccactttgatgacagaacaaccttccgatcgccgttatccccagatttttttgatccccttataaaagggaaaatccggttatagcgtatgcttacggagcgagctttctttcagaaagcttttagcgtcccctccgtttctccagcttttttctgtcctcttcgttcctgtgtattctcatatgcatttcatatagcctttcgtttttttatttaactgagccttgcgcgaagccattgtagatgtacttctgtaacagcaggaagatgatcatcgttggaataatggcgatcatgatgccggcgctgatgacctcccactgcgatccgaacggtcccttgaatttgaacaaggcggtggatatgacctgtagatcggtctttggcatgtagaggaacggtgtgtagaagtcattatagatgttcacacccttcacgataatgaccgttacaatggccggtttcagcagtggcagaatgattttccagtagatcgtgaagtacgacgcgccgtccagcatggcggattcatccagtgcacttgagatggagcccaggaattgcaggaagatataaaccgcgatgatatctgtacccaggtacatcacgatggccgcccagcgcgtgttgaacaggtcgagcgcgttgatgatctggaatgtggcgacctgcgttgtaacacttggaatcagggtagcgagcaggaatgccgcgaccataatcttcttacctttgaatttgaaacgatccagtacatacgcgatcatggaaccggttaaagtcgctcctataatggagatgatcaggataataattgtatttttgaaaccgaccagcatgttaccatccacaaaagccttcgtatagttcgcaaagttcagccagttggctggtggagcaagcgggctgctggtagcgtattccgcattcgttttgagagatgcaaataggatgaccacgatgggcaaaagcgcgataaacgccgcaataaccagggaagcatatttaaccacgctcgcaagggtgtatttgagttgtgtcacgtttattcctcccctttcatggtgacgcgttgcacaagcgtaacgagaataacgatcaagagcagcaccacagccatggcggatgccagtcccagcttgccatatttaaacgccaaatgaaccgtctggattacaaatgtcatactgccgttggaaccatcggtcatgatatatggaatatcgaacgcactaattgcgccgctaatcgccaagatcaggttgagctgcaggatacgtgtaatgcttggcaggatgatgtggcggaattgctgccagcgattggcaccatcaatatcggatgcttcatacacatcctttggaatggaggagattgcacccaggaaaatgataaagttgaagcccatgtatctccatactgatgcacctgcgagtgacacgttgataatattcggattaccgagccagaactgcgtgtattgtcccagccctacagcatgcatgagcatatcgagtgtaccgtccggtttgaagaaaaagaggaagataaaaccgatggctaccccattcagcaaataagggaaaaacagtatgcctttgaaaaagtttttgcctcgaaccttgaaactcagaatggtggcaaagtaaagcgccaagcccatctgtaagaacgtagccacgaagtaatacaagctgacaataaatactttgaagtattcgggatcactgaatatgcgcgtgtagttctcaaacccaacataatcaaaccttttactgtatccgttccaatcggtgaaactgtatttgaacatgttaatgaccggtaagtatgcaaatgtaaacagcaacgccagcggaataattgagaaggcacagatgataaatatgcgttgcgctgagtagccccaattcgaaagttttaagtacttcatgctctccacacctccaagcggttctcccgcctatatatcgaaagactcccgtccaatggaattcctgcggaataactgccggggaagagcatgggtatcaagctttcaaataccacatactccattcacaaatggattcctatatccccgcagtccattcatcacctgatccacttacgttaatccaattatttcgtgagttctgctcttgctttgacccacttgtcgttcagatctttcatgatgtcgtcatacgattccttgcggttcccaatacctgcttcgataatgcgtttcttgaagtcaggctgccagagaccaatttcgccttcgttatcaatcttgtcgaccagaccttcctgaccttctttggcaggtgtaagcgtggagaatttcacatctttatattgatccaaaatcggtggcaattcagcattcttgtctgcatccataccgccgccttgttcaaccgcgtagttcgacttcgccaggaaccagtcaatccaggctttggcagcaggtttgttctcactgttcacgttcatgccgatgttatagtctgcggagagcggaaccacaacctcacttgcattggttgggaaaggaaggaatccgatgtcgtccggggtatccgtcatgccttggatctgtgtgatcgcccaagagcccagtgccattgtggcaattttgcctttggcaagatctgctttggagctttcccagtcggttgttgttggatctttctcgattagaccgttcttggctgcatcatagagcactttatatagttcataatgcggctgaccaggcacaaagttctcatctgtgttcggttggtccacgttaacgtaatccacactgcctgcaaccgttggcagatccgattcccattgggtgagagcccagccggatgcatagttggtatagagcggaaccgcatcagtattatctttgatcaactgaagcgcagcctggaattgctccggtgtttttggaacttccataatgcctgcgtctttgaagacctgtttgttataaatgattccagagaacgtgatcacggtagggataccgtagacctgaccatccaccatgcgttcttcaatggcggtgtatttgtctttcaattcatcgtacgtgccgagcggctcgaaaaagtccgggatatctgcgatcggaacactggtcgggatcatcagtacgtcaccataatccttggtgctcatacggatcttcacttgtccttcgtagtcggccagcgcctgaaagtttacttttacatcaggatattccttgttgaattctgccgcgtaatctttgaatacggtatcaacaatatctgtccgttgcgtcagaacggttatttcacccttgatatctgccggatctgtactgatctcctcccctgcctgcgaagatccacctccggatgaacatgcagcaagtagtgaagtgatgagcagcatcgtcagcaacatcatccaacctttgttttttttcaattgtttcgacccctctcttaaattaattaagttatcgttaaggttacaaaatgaattctattatggtaacgcttacctgtcaattaaattatttataacttaacaagaaaaattgcgatgcatttcgttgacatctgtttttcagagcactaatattgattaataaagttatcgttaacttaatttaattagattgatgcactattttgaaggagcgctcacttatgaatacaaaaacaatcgaacttcaatctgaaattaaggcgcattgggaaaagcaaattttacccttctggtccaaccttaaggatacaacccacggtggattctacggttgggtcggcaatgatcttcaggttaatcaacaggcacccaaaggcgggatcgccacggcacggcaactatggtcttttgcagcagcctatcgggttaccggaaacgaaagatggcgcgatcacgcggagcacgcctatcggtttctcgctgatcatgtgatggacaccgaatatggcggtatgtactggatggtagattacacaggggaagcactggacacgagcaaacatgtgtatacgcaatcattcggcgtgtattcactcagtgagtactatcgtgctaccggggatgcttctgcattggaacttgcgaaaacgctttttgctctaatcgaggacaaaggtctggatgccgaactacctgcgtacaaggaacaatttgatcgcacatggaaggaacagcccaatgaaatgctgagcgaaaatggagtgattgcggattacacaatgaatacgcatatccatgtgctggaggcctacaccacgctctatcgcgtgtggccggatcaacaagtgaaggcggcgctggaacgcctactcgggattctgtatgaacgggtgtatgaccaagacaccaagtttctcggggtatttttcaacaaacagtgggaatccatcattgacctgcgctcgttcggacatgacattgaagccagctggctgattgacgaagcattgaaagttctggggatggaacaacatctggagtatgcggcgatggttacggatatcgcctataacatttccaatgtagccgtgaatgccgatggttccctgttaaatgaacaagaaggtgaacatatcgatgagaagcgaatctggtgggttcaagctgaggcgatggtcggtttctataatgcatttcagcgtacaggtgatccattgtttctggagagagtggaacgcttgtggacctataccaaagaaaacatcattgatcagcgcgctggtggggaatggtactggtcggttgatgcaaacggaacaccggatcagagcgaaattgccggaccgtggaaatgcccgtatcacaatagcagattctgtattgaactaatggagaggatgggatcagaatgatacacccgaaatacaaggagttactggagaaacaggagcagctgcttactcgccctaatgagatcaattcttccttctacaacggcgtatatgatcggtaccaatatccagttatcactcgccatcatgtaccgctgcattggagattcgatctggatgagacgacgaacccgcatttcatggaacgcctgggcattaacgcaacactgaatccgggagccatctatttcaatggcaaatacatcatggtcatccgtacggaaggattggatcgcaaatcaatctttgcactcgccgagagtgacaatgggattgacggattccgtttcacgggtaaaccattggtctgggaagatatcgatgcggatgaaaccaatcagtatgatatgcgcctcgttcaacatgaagatggctggatctatggcatctattgctcggaacgtaaagacccggatgctcctgcatttgatacatccagcgcagttgcacaggcaggactggttcgtacacgggatcttacaagctgggaacggttgcccaacatcacaacgaattcccctcaacagcgcaatgtcgttttgcacccggaattcgtggatggaaagtatgccttttacacccgtccacaagacggattcatctccacaggcagcggcggcggaatcgcctttggtctgtgtgaggatatcttgaaccctgtcattcatgaagagaacattatcgacgaacggcaatatcatacggtatatgaggtcaaaaacggtcaaggccctgctccgctcaagacggatcatggctggattcacattgctcacggagttcggaacaccgcggcaggcctgcgttatgtgttatacacctttgctacggatctgaatgatccggcgcgtattattgccaagccgggcggccacttcattgccccttatgacgatgagcgtgtaggcgatgtgtccaatgttattttctgcaacggtgctgtggtcaatgagaaggaagaagtctttatctattacgcttccagcgatacccgctgtcatgtggcaacaacgactctggagaaactggtcgattatacgttcaatacaccggctgatccgtatcgttccctggactgtgccagccagcggggtcagctgattgaacagaatgagaagcttttacagaaacaattaacgtaacatcggtagagcgtcctctcagggaaacctgcaatgtgctgaaaattagcgaaacaacagccagaaagactttattccaagtgggtaacgatgtatactgatatggattgttattatgttggaagaaagtgttcatcataatgacagcacattgtgcctataccggcttgaaggaggcgaccatactgaagaacaatatcaccatgcgggatatcgccgacaggctcggggtcagcagtgtgaccgtctcgaaagcattgaatgataaagatggcgtgagtggcgaattaaaggaaaaaattaaagtgcttgctgttgaaatgggctatcggtataatgctgctgcccgttcgatgaaggaaggcttaacccataatattggcgtaattatcccggagcgttttaccgggcctacgcagtcgttctatgtacgcgtgttccagcgcatcaccaaacatctggaggaacagggctactacggcattctgcacattctgaatgtggaggatgaggaagaattaacgttgcccaagctgtacagtgacaacaaggtcgatggtttcatcgtgctcggacagatcagcaaagagtatattgaactggtgcgatcgatggaagttcccaaaatgtttctcgacttctacgatgaacattcggacatcgattccgttgttaccgataacttctacgctgcctatgagctgacgaactatctggttcagcagggtcaccgtaacattgcttatgtagggaacctgtattccacgagcagcatccaggaccgattcctcgggtactacaaatccttgctggaacatcgcttgccgatgaatccggatctggttctgaatgatcgggatgaacggggtacgtttattgagattgatctgccggaacagctgccaaccgcttttgtatgcaactgtgatcaggtcgctcatctgctcgttcagaaactgacttccatggatattcaggtgcctggccaatgctctgttgttggttttgataatgatatctatgccacgctctccgatcccaagctcacaaccgtcgaagtggatgtggaacagatggcacgcacggcagttcagtccatgctcaaaaaggtcgacaacccaaaccgcagtttcggccgtgtacatgtgaaaggcaacatcatctatcgtgactcggtgagtactgtgtctgcctcatcagatactatggatacttgaacaaaaaaatgaaataaacgaacacagatgactggcctttatcttactggccagtcttttctgatgcattggagcttaacgacggcgatgatctgttgaatccatcaaaaatgtagtcgttctccaaatcgagaggatgaggatcagctcatacacattggttaaagtaccggtttccactggcagggagattaactgccctacaaacaacaaggcagttccaacaaacagccaaacccatttatgtttgaaaagaacgaccaggctaacaaataacagaacaagccccacgatgatcaccatcatcggcggacctccatgaccttctgccatatatctcagtactccatactcttctataaccctgagattttcaacctccgataaagtaaagcctacaacctgatagataaccagacctaaagttatcagccatgctaccacactcgttatacttctattggcaaacttggcacctgagctgcgcaagatatggtagccaacaagaataagggtaggggtagcaaaggcatgtagccaaaatcgaaggctactgaggaccattaacacttccccatcccctatcaaattacctacagcaataattccattgtcatatgccaagctgaacgctacgaatagctgaaaactggaatacgtgagccattgcttcctctgggttaaatcgacggccatccaaacaacaagtatcaaataaacaagagtaagtacggagtatatccatacatccaagctgcttcaccatccttattggtcaattctaataaattatatttaccggtaagtaaaattacaaggcatacttgtataaatggttaatttgtcataaattactcacaaaagtaatgaagataaataaagattcacaacgatcaccggcgagactaacacatgctgtagctggagatgatccaccctaacaaggagtcacttttcaagcggcccgccaaactgtttatggagcggattcatataaaaagagcactcccggctatcctagctgcaggagcactcttttccttatttgaagaacgtaaaagcaacaggttactttgatatcaataacttgtcttcaaccaattgtccttggaccaggtcaatttaccggaacccgcgccattggaagccgtgaggcgtgcattcaacgtagatggatcatccgtggtatagctgtaaggcagtgacgaaaaaccgttccaggagaacgatttcaccacggccgggattggcgccaacgggctgccagacgtatcactgctgccacggaatgagctgccatccaaagaatacatggtatcggtcactctgattttgccggtataggttgcgtctgccggatcggtctgattgttgcgaacaggatacagaacgtccttgatgactgatttctcgaccaatacggctccgctctctgtggagattgccccattgccaatgatatcgaacttataacctttggacgcaatcgctgttgccatcgccgttgtaattttggctttagcggcacgtgcccctgtcgaatccatcacgatgttgtatacatgtgcgttgcctccacgcaggcgcggcatccgatcctgaatatctttgtataagttatggtgcagcgtcatggacaggttggcattagccgattccaggctggtcgaaccgaccagatgtcctttcttttggggtcctgagatggcgataatatcggctttgctgagacctacagcactgctgcgcaggtagttatacatgggataggaagccttgtttgcttccaattcgttaatctgctgggtaacccagctgttcgagctgccgtcatcccctttgaagagggaccaggagatggtcacgccgctggttccttttttcgaatcgacgagtccgtcataggctttattaaatgtgcagtgatcaatccacacgttgctgttctcctccagggtgatgtaatcccaatcgttcttgtcgtaatcacctttggtggattcatcccattcccataactcatcaaattccaggttgcggatgatgacatttgagcttcgtttcacgctgatcgcagcgtgtttgatcttggaaccattggcggagaaaatcgtgagtccattgaaaccgtcaatcgtgagcttgctgacaccggtctgttttaatacgggatgtgtcagcgcatcattatgcttggcaaaaggagaagtctgcgctgcgctcggaatttcattccatcccagattcagatcgttcatgatctcaacaactttgacaccggagttctttttcagcgccaatgccagatcggtcgcattatacactttcttatacgttgctgtgtttgattcgctaatgatgccgccgcccgcattcccttgggagaagcctgtgagattgtaatctgcgttgcccgctgcctgcacacttgctggtccggacaatattgttagccccaacgttatagccaaggctgtgctgcacatgcttcgaaatttgcttttcatcgattccattcctcccaatatatgatgatgacattcgtccatcgctgccatgccaggtacgaaggacatgttctcaatgtaagtgttgaaagcgattacaacaataatccctatctcacatttcggcgggaaatgctgatgtggtgagggattgtactggaagcaaccttgaatcgtacagagttaacttggggagtgaggttttaggtatacatcaacacaacaagaaggtgtcggataaaatgaaaccaaaaaagcaggactgcatctgctgcagacctgctcgattttactttttgatggaacgtgtccagaagccgccatggaactgtttgggctccacggtaataacaaatgctttggggtccagatcgagaatcgtctggtagagcaatttctggtttttacgttttgccagaatctccatcacaagccgatctccatcacgtccactgcccacccatgcagtaacaccatatcctttatctcgcagagcattcgcgacgcttccatccagctgattacagattactttaacggtgatataaccgagcgcaatcttttcttcaatccacgctccgagcagcacacccaatccgtaacctaccgcatatacaatcagggcctccggttgtttaagatagtttaacaccagattcagaccgagcacatagatcacaatctcacccatgctgatcagtgcggcgatgtatttctgtcctttgagtgtcagaatcatccggagtgtataagcggatacgtacacaatctggatcaaaaagataaataccaatattttaaacaatcacaatccctctttcctggccctcccaacggaattggccctttgctgcatatactcgacgatttcgtttcatctatgcttcctgtatgttcgctctatctccatcattggacgttatgccctcattctaaacggttgaatgtaaatccgtaggcattttctgctctctggcatgccggaactgcaattatagaaccgtttgtaccgattatcaacccagcagaggtcccagggtcgaaaatgggagtctttgaatatgctgtatcatcataaagccaagcacgctcgcacaggatatcaggtcagaaccaggatggatgggtcaaaacaaaaagggggtaccgtcatgcagctattgcaggagatggagcgggaaggcatggaggaactcattttttgccatgatgcagttagtggattgagggcggtcattgccattcataatacggtccttggacctgcgctcggcggatgtcgctactggacgtatgcgtccgaggaagaagctgttcgggatgctgtgaaacttgccaaaggcatgacgtacaaaaatgcaatctccggactgccgtatggcggcgggaaagtagtcatatgggatgtaccttttgtgaagaatgcaaaaccggatgaggatggttgcggatctcaaagtgttgagcaggtcgctggagatctaggggtagagaaacaaaagggcgctgccgctgaacgggaagtcgtcgctgatgaggttgctgatcgtatagataagagcctggatacggacgtatccaagcgggcgcagcgctttcgcgcactgggtcgttgtctggagcggctgaacgggcgatacgtgaccggtcttgatctgggtaccacggcggcagacatggaccagatccggctggagaccgcacatgtgacggacaccacgggttcgcttggggcgcaggatgacttcactgccgagatgaccgcctacggcgtacacatcggcattgtgacctcgctgcgccagcaaggcattgcatctttgcagggcattcccgttgccgtccagggactgggcaaggtcgggtatgccctgtgccgttacctgcatgcagccggggcacggctcattgtggcagacgttgtaccggagcgtgtacaacgtgcccttgtgcagttcagcggcgccatctcggccgatccgtcccatatccacgccgctgactgcaaggtcttcgccccctgtgccctagggggcgtactgaccccggcaacggtggaggagctgcgctgctccatcgttgccggggcggccaacaaccagctgagtgaacgacagctggttgcaggccgcatgcaggcgcgcggcatcctgtacgcgcctgattatgtgctcaacgcaggcggaatcatctccaccgcctacgagctggaaggcgccgggcctgacctgatccgccaaaaagtggcggggattgcaggcacgctgagcaaggtatacgcagacgctgcgcaatctgcgatctccacagccgatgcagccgatcggctagccgaacccatcctccgctcaggccataagaaatagggcatccaaccctgctacctatgcatattcacgccgcccacactttcttcgtcactctaatgttcaaagctatagcatatctggaactcattatagcttcactggatttcgacatttcgacgtactgaaagagagcctccactgctttactccattctaacgaatctgttacaccctatttgccccttttagcgcgaacctaatatctaacgaatctcagacgcactatttcgcctagtttggtcctttttcaagctaaataactacttttccgaaggatagcgttcctgaggttcgttagaatttatatttcagattttcaccctgaataggttgtctcaggttcgttagcgctgcggcgaaggtttccttggggtagtatcacctatcaaaaagagctaacctagacgtaagtgtcccggttagctctttttagcccttcttagttcttcttagttcttcttagcactcttaactcttctaggctcttatcacttcgtccttctactttctaatcccttatcgcttttgctcttgctcttgctcttgctcttgctcttgctcttgctcttgattctttgattctttggctcatttttttccaatcgctctctgtacggattacattaagttttcttgtaaaccgtccctctcaacgtaatccaccctcttttctttccttcttttactcttttattcttcagttctactactctattctcaaactgcaaccgacctcttcttcgctgtcttcttctctcgaaacagtagcgtccacagcaacacattcgctacgatcagtagcgcaccatagatccatacgccccccgacactgatcggaaaaagacatggactccccataacatagcaagcacaggaagggcggcgaatacataccaaccatcactttgctgcgccatactgaaggattgggagaacggcggcttacgcagcaacaatttgcctgccattgggacaagcgccgtagccgtcagcataataatcgcaatatctggcagtatccgtaatccaaatgtccaggtaaacaaaatggcatttgccagaaatataggcaggaacatgttgcacaagaacgccttcagagcgcctttatataacgcgctatcattcgccatcggtgcagcgcgaaaggtccagaatgccttgtattgtcctgaaaatttcagcatgaccaccaccgttacaaccagcatcagcacgatgtaaaaggtgtatacaaacgaactttgtctaaactccgcccaactagaagattgcaattcagtaaaccaaaatacataaggtaaaacaaatgataaaccaagcgatggatacaccttcagcttgaattcccgttcattacgcatcatgctggctgacagacggaagcaagcctgctcttctctcgaacgactgaccaccttggagatcaaccgatcccatcttccacgtctgcgtccggaggactgacccgaatgtgccattttttccaaatacaattcaaaggaaggcataagcttcacatatacgatcatactcaccacaggaaccaagactgccagtgctgtgaacgtatagatccacacattcccgccccctgcaaataaccattcatatgcagccgcataccataacggaggtaacagcaactgccaccaagccggggtaaataccataccaaagtcaataatgctgaacgaacgaatgaccagctgataaccgatcgcaatccccacggaaagcagaatttgcaccatattgatcatatccttcagcttctcaccatccagaaacttcatcatgaacagatagatcagagacgttgtcaccagaatcagcatattgatcagaatcagttccacaaggaagatcagaaagaatccgatcccatgcgttaccaacgcagcaattagcggtataccggttaatgaacctgtcagtaatagcaggtatacgcccgcatggatggctcgggccatccccaccgttcgtccattaacgggcttggtcataataatattacgatcccggatgtccagcagcacagaggaaaaatccgagatcatggacgtcatgatcataaacattaatatgccaaacacaaggcccatctgaagcatgaaatgccccgtatcccagacgatgaagggaaccatcatcagtcccattaatccatataaccacagggatcgaagaaactgattaccttccttgcgctcctttttccctgaattgttggataaaatagtaggtactctgcgttgatccatctggaacttcactcgcaagatcaggcgcagcacatcataatccgcccctgttctggcgatgagcggacgaaagcgatccagaatcttgagtgtgcggaagtcggaggattcctccatatcagtacacctcctgcacaatcgatacaaaacgctccgcaatggctttatgctcattgaagcctgtcaattgattgaatacttcctccagcgtaccttccatggattgctgttgaagctgcttgaacgtaccgtctgccactacgcgtccttcagcgatcagtacaattcgactgctgatcttctccaccacatccatgatgtgtgacgaatagaagatcgttgtgcctttggctgacaattgtgacaaaatctctttgaccaccatcacactattggcatccaatccgctgagtggttcatccaggaacaacagatccgggtcatgcagcagcgcagagatcaacagcactttctgacgcatacctttggaaaaagaggcaatgcgggaatgatatgatttttccagtccaaaacaatccatcaatagcttggctttgtaatccgcatcctcataggacataccgtataactctcccgtaaaagtcagatactccgcaggcgttaattgttcatacaattccgccacctccggaacatagccgattcggcgtttatactctacatccccatccgcaatatctttaccaaagattcgcaccgtgcctacatatccttcaaccagcccgagtaaaatcttaaccgtcgtacttttgccagccccgtttgggccaatatatccaatcatctcaccacgattcacttccagatcgatgccgttcagcacataacgtccgttgtatctcatacgcaagctttcaatggatagcacttgttgttcactcacttcgttatccagctcctgtctctatctttttctacaattctactagtttaccacagattgggatggtaatgatcggaaataggtcacgatatgagccatcaactggatatccctttcgagtaaaagcatcacgtaacatgggtaaatacatcacaaagcccctgtcccaccttatggtaagagacaagggcttccactttatgttgaatcttattttctaatatctaaaagtcttactgcaccttaacaatctgaaaatgttgattcgtgccgccattatccgtccactggatggccgcagccccatctgccagggattgactggagatatccaataccttgcctgtactgcggttcttcagtttataataaccaccacctacatggacgagttgccattgctggctggcccaaccaccatcattccactgttcaatgacagccccatcggtcgtggcaccattctccacaccaattagcttgccactggaacggttgatgattttgacataaccgccagccgcatcggtaatctgccactgttgacttgtcatccccccatctgctcgctgctccagatccgcaccgttggcggaagaaccccctatgacattaagtaatttattgcttttacggctaatcagctgatatgaagcattcgggtcccagacatccggtgtactcactccggtcacagtccctgttgctgtatcaatcgtaatactgctggcccagttcatcgccagactagttgcgctcggaaatgaaagtggcagccagacatacttggaatcctgcacaggtccgctccatgcaccagcccagcgatcacccaagtagagataggatgtggtctgtgaaccttctacaggaacaacataggtggattgggaaccatacgttgtgctgtctccaaaattgcttaggccgctccatgtgcctgtaatgctggaggctgtcgcatatttggcctgatttggattccagccggtcgcacccgaagtaatcaggaagtagacgccgtcttttttgaatagggctggtgcttcacgatattgtccaggccacagcgttgtgactagggattccacacccaggaaatccggggtcagcttatatatattcagatcagcattcactcgggtcgcagagatcagataagcggttccgttatcgttgtataccgtcatgtctctggaatcatacccaagtggacgataactgcccacatatgtgtaattgccatccaccgtattagaagtagctaccgccactcgggcctcgccataatccagaccattctccttgtgcatccacagcacatatttgccggtagcactgttgtagatgacctttgggcgttcaatgttagagatatttagctcggccgccgagctgctggtcagcacatcattacgatactcccagttcttcagatccgatgaacgatacacggacactgccttgaacgttccattcgtattacgattctctccaaaccagtaataatacccatttgccttaatcatcccgcccccatgagcatgaacgacattgccattggtatccttgaactgtatcccgttcgttacactaagtggagcagctgaagcatccggtccgggtgcaagcagcatacctatggattgcagcgccaaaaccaaagcaagcagataactcaagcgacgggtaaagcgacgtgaatgtgtattctttttcaaccatccatcgttcatagccatatcgtaatgcacctccatgttttttatgaagcgcttacataaaattaaaatcgatatgtctcatctgcctccgatcgatgatgcatttcagtaatagaattccttgtattcctggctgggcgttcacctccctgattccgattgtatccgccacgttcctgctcgaatagtgaacaatccggcggaagatgtacaattttatactccgctctctccatcaacagcaaaaagacgcttcccccgaagcgtcctctgctatacctgccctgccctccatgatgtaacgatctctagctgtgtgcggctgttcataggcaggtttttatatgatgttttatcggcgtatactcgcccttattgcttagtcttggtcgtcaaaatcctggtcaaacgataacactttacctgtgttggcatcgatatctacatctgcttcaccttgagcagttctcagttcgatctcatacacatagcgaccatcatcatgatccagctcgactttggttactttaccacccgtaacttgtttcaacgcaatatttgaagcttgggatgccgtcaatttgacctgcttggaagtagaggtattagatgtgttgcctgttgcagtacctttataatcgtcgtcatcatcgtagtcttcatcattcacgaccgcaaggattttgcctgtataagcatccagacgaacgacaacatcattggttccttttctgtcgatctcaacttcatagaacgtttggccgtttctacgctccagatccacgtcatccactttaccatcggctgcttttaacgccaacgctttcgcttgtgatgcattcagcattttacctgtgctgttctgattctgtgttgcagattgtgttgttgacgttggtgtagtttgcaccgattgtccgttcacattcccgctagccgctacggccgatccaccaagtaatactgctgctgacaagctaccaatccaaagtttatgtttgttcatcatcatcattcatctcctcgttgttgttgtttcgttctcgtctacatttatagaataacctgcaggaatgagagatcagcgagagttagattagaatttgatgagaaaatgaagagaatgctcatttaatgagtgttcattatgtatgtaatctaaaagaaatgaaaaagatgaccccaacattaggaatcatctatccaacaaggtgtaactctatattcaatggattcctgtacaaatgttaatcatcgtcctcatcccaagtcaccgaacgaattgctcctgagatggcattcacttgcacaatagcctcccggccatcctccaaatcaatttcaaccagataatatggattcccgctgttggttccacgcagttcgatgtcgtccacttcccccggaacctccgcaagtgccttctgtttggcttgtttctcgctcagaaactgaggtttgggatcatccttggttggttcagttgtcggggctgctattgtttgggaagctatcgtctctcccgtgtatggatcaatcgtgagttcttcacgactgttatcctttgccttcactaccgcggtgtataccggactgccttgctgctccacaagttcaagcgagaccaattggttatctgtctgttgttttaacaacgccgtcttgatctgctcgcggctccataacgtcttctcttccgcttgcgggttcgactccagccgtttaatggaattcacagtagctgtaacggcatccacttgcacatcatataggccggtctccgaacggagctgcatgatatacgtcccgtccttcaacgtggaattcacaatctcccctggatattgatccagcacagattgtgctgccgcatctgccgtaagtaccgcacccgtcgattgccacggcttccaccacaccacaactgccacaatcagcacaacgagaagccctgcaccccaccagagtgaccttcgcgatttcgcccatccaatgttcccttgttcatgccgtttcatctccggtggtcgctgctcatgctctgtcatcacgtttccccctatgcactctcttatcatccccagttgatctgatgcttatcagtatataagagaagaatgagaatttcatgagagcggcccgttctgaaccgataaaggcaaaataattgaagcctcggtgccttcaccctcggtgctggtcagttcgatccgtgctccaactgcccctgcaagctctttggcaagtgacaatcccagacctgaaccacttgcacctaagctgcgtgttctggccggatcaacccggtagaatcggtcaaataccttttccagctcgtcctcccgcataccaatcccggtatccacaatccgaatacggcactcttgccccttggcttctagcctgacttcaattgcatcctcactatacttccgggcattatccagcaaaataaacaacagttgcttcagcttactctcatcgctgatcgcccatattgaacctggatcttcacactggacttcacggtgataggcttcgcgaaatgcacgtgtcgagtctgtagccagtctcgtgatatctacacgctccaactgcacattccactgctctggctgcttcgcaagcagtaacagttgctcggtcatctctcgcatgcgaaccgattcggacagaatcgcttccaccgcttcatcaaatacctcgggccgctcttttcctcgccgctgtagcagactggcatagctctcaataatggtcagcggtgttttgagctcatgagatgcatcggatacaaatcgctcctgtcgttcaaagttggattcgagcagatccatcatccggttaaacgtctgtcccattgttttcagttcatccttcgatccttcctccagtggaagacgcttgaattgtccgctggactggatatcagtcatcgtgcgtgtcatctgctgaatcggtctggtcattcgattcgccagaatccggctggagataatggctggaatgagagcaataatcgtgaccgccacaagcacagttcgcagtacagacagacgattctccgtttctgcaatgctctcggtgacctgtacattcaccacctcgccatcaggccagatgaccgggactgatacccacacataaccaatctgttcaacttgggtatactccgatttcttctcactttcgtacttataaggcagcttgctcagctgctcggaagctgctgttgttgtcaccggggaactggtgccgtcttcattaacaatccggagcatgccgttcacaggcgcgtaggcccgtaacaagtcatccggcggaatggagccggcagactgacgcactcctttgacaatagactccgcttccgcttccacccgattaacctcgttatcaatcgacattcgttcaaacacgatgtagaccgacaggttcaccgcgattaacagcacagcaaataatacagacgaatatccgtagattttactgcgcaggctcataactgttccttcaggacgtatcctacaccccgtacggtatgtattaagggtggtgtgaatccgttatccacctttttgcgcacataacggatgtacacatccaccacattagtatctccataataatcgtatccccacacggcctgcacaatctgatcacgactgagcacctgacgttgattctgaagcaggtacacgagcaggtcgaactcacgtggagtaagctcaatggccacaccatctcgggatacctctcgcgttccttcatttagtttcaacccggcagccgtcaaccagcccgcctcagcttcatccttatgcccagaagagtcattccccgtatcagcaggtgtagacgaagaagcggaagaaacaacagacgccactgcactaagccgcaatgcagcccgaactctggcaagtagctcttcaatctggaagggcttggtgatgtagtcattggctcctagatccaggccggatactttgtcttctacagaatctttggcagtgagcataatgatcggaaccgtagcatctttggcacgaactcgccgcaacacttcaattccactcagaccaggcaacatcacatccagcagaatcagatcccactgtccttctgcatacttctccagtccttctgttccactgcctgccttgcctacctgatacccctcatactgtagttccagttccagcagacgtgctattttgggctcatcctctatgaccagcacggcttcgttcatgcagcgctccccctcatccccatcatttcattctcccgttatcttacaataacatctacaatttgcccaaagcatcttcaaccggatgctccccggcaattagatcaaaggccatccggtacgtcttctcttcctgcaaagaagccacgattacgcgggctacatcttcacgcgggatgcttcccggctccagatcggttccaactgcaatcttgcctgtgcccggttcattcttgagaccacctggacgtataatcgtgtaattgagatcacttgcaaacaacacacgatccgcataatgtttcgccacgtaataaggcttaatggactcagaccatttctcccgttgatctgcgccatacgcactgaccagaatatatctggagattccttgctgctctgcggcttccatcgttttcaccgcaccgtcgagatcgataagcagtgttttgtcctgaccggtagatccgccagaacccgccgtaaacacaatggcattatgatccttcattgcctcagccaaatcctctacactaccctccaggtcaccaatcaccacatctgcaccgagttccttcagtgcatccgcctgctccggtttgcggatcatagccgttactttatgtttgccttcctgtgccagctgctccaccacaaacttaccgatttgcccatttgctcctataactaaaacgttcatacgtcattctcctctcagttgaacggatggcttgttgttgctccccgttccttttatttaaagatgctcatcctataatttaaacgaaagccggcgcttctaagcgccggcttcatgtccatgcccgttcagtacctctatgaaatgtgaaggattccatcgttccattaatatgccatatcccctaggtactttatacgcgacctcacatcgaccacttctgccgcacctttttcatctgaatatctgttattctttgtaatggtgacaaccaaaaaggacgcccaaaagggcgcccttgaatggcattaagattagtaagccagtgcgaacaaaccgtgaatgtgagccaggtaacggatgttacttgcttctttcatcatggttgcaggcagacctttcagacgagtctggttgccaccgatcatgccgacagcatctttacgacccagacttcccagcgtaccggagaatactggtgtgaaggattccattgcgccacctttgaacataacgcccaagttgtgaccaatagtctcacccatttgccaagccaattgtgctgttggagggtaagggcgagcgccttcgctagggaagaccactgcgctgtcaccagcaacaaacacgtctttgtgagaagtagattgcagaacttccgtaactttcgcacggccacgatccacttcaattccgctgttagcaacaacagcgttgccttgtacgccacctgtccatacgagtgtgttcgtagggatggagctgccgtctttcagcagaacttcgttttctttcatctcggtaatcgctacgccaacgatgaagttaacgccacgtttctcaagacttgatttagcacgttcaaccagctctggcgggaatcctgccaggatggaaggacctgcttcaactgtgtacagggatacttctttgaagtcgatgcctttttcttgacatacagcaggaagcaggtcagcgaattcgccaacaagctcaatacctgtcaagccgccgccaccaataacaaacgtagcgtctgctttgttgccggactgtttgtaagcatcaagacgtgcttcaacgtgtgcacgaatacggtttgcatcgctaaccgatttgagcgtgaagctgtactcttgcaatcccggaattccgaagaatgccgtttcgctgcccaaggcaacaacaagtgcatcgtaagagtatgtggagccgctggtcatcagaactttcttctcgtccggcttgattgtatccaccgtatcgattttcaagttcacgtttttgccacgcagcaatttttcaagtggaagagcaactgcttgttcagcaatgcttcccgctgcaagacggtgcagttccgtgataatttggtgtgtagggtaacggttcacgacagtaattgtcgcttcttccggagacaagtattgacgcgcagtcaatgcagtcaacagaccgccgtatcctccacccaagatcaaaatttgcttcgacatatccatcctccgttcttctaagtcttaacgtttcggttgttgacgctcgttcaagatgctcaagaaagattgagcaaaacgaagcgattgttgtacgtttggatctttaagcattttcagcatagcgaacaagccaactgaagtttgctctgtttgcgcacggtcattggcttcgatggcagcagaagctacacctttagctttgtctacaacaggcttagcgaactcgcccattgcgctcattgtgtcgctgatcagaactttgtctgttgctacactttgtgcaaagtcataagcttttgtcatagcagtaaccatttcagccaatttaggcaggttctccaccagaacggttaaagactcctgtacctcaggcttcatcagttgatccagaacgtccaaggactggcgctcggaaacgttggcaccttctgtaactggcacctcttgttgagtaggcgattgtgacataagagaaagtcctcctttactttgggatagaagtccgcgactttcatgatgcctgtcaagcagagccgaaccacaaaatacatcgaatacatttaaatgtaccaaatttcacacaataggatgagcgtagctcatggccactcccatatcatgcattgtatcttggatctattgcggacaacatgtgttgacgcacaaaacgacaagcaggccgaaaccgaactctatacccttatattacacctcttacacatgaacatgaaaaagaaattttttacacttgtgaagatattgtgaacattgtaacaaaatcgatttttttgtcaacccataaaggcaagctaacgccgccgatcctcctgtccaagatccgtattcctaccacatgtggtattaagacaagatcacatatgaccagatgtgcgatatgtacacaaggaaggattcgtttatccaaaatatcaggaattgttttccaatatcacaattttcatgcaacgaaattggtcactgtcgttattatgcagcgttgggctcagccttattccaacattgagacatcttttctatttcaagtatgaacctcttgcgtcacgaatgcaaaacttggaacaaagccattgcgtttagaatgcggacatcccggttaataaggactacaccagaaacgaaggagatgttcgatatgagtaattcaactggcgacaaaatcaaagcaggcgtaaataaagccaaaggcgaagtgaaggatcagatcggtaatgcaaccaacaacagatcccttcaggctgagggtaaaaaagacaaagccaaaggtgctgtacaggataaaattgccgacattaaaaaagatcatcactagatccatttaatgtgaggtccaacagcacgaaaatttcgtgcaatagattattttaaaatagcctgaccgtccgtgttcggaagctatccgaaaatgagacggaggcgcaaaaaagccaaggaaggtgttactcaatacacccttccctggctttttttgttcattttatactgctggaactgcgtatcttgccatatcgacaatgaaactgcgtgtttcccttgttgtatggtattcacggctgaactgtctgacccattcgggatgttcccgataccaacggaaagttttttccaatcccttttccaacgtggtttgcggtaaccatcccaattccgctcgcaatctgcctgaatgtacgaccagactcgaccctctggactgggttggttcttgctcccggatctctacagcagctacggatcgatccattggtttcaatatctcccctatttcctgcatggttgttccaagccctgtcgatatgttgtagacctgtccgtctttgcctttcagcatgatctgttcaatggcccggagggcatcatctacatacaagaaatcacgcactgccgatccctgaatatccagaggcagtccgtccaacatccgaccaaaatttcggggaataatacggtctggtaattgccatggaccatagaggttggtcaaacgaaagagtttgactggaagctggtaacattgagcataggagtgagccagcatttcacacgcgactttggacgcggaataaggagagacgggtgcatacggatctgattcatgatagactctgccccaatcgccgccatacacttcaacggatgaagccagcaagactggaatgtgatgttccgtagcatattgcaggacagcctgtgtgctgagtgtattattgcggaaaacttcccctggctgatgatacgaataatccacgtgtggcatggccgccagatggattatgtaatctgttcctggaggtagatgaatccggtccgatgcaaggtcacaacagatgaacggcatctcgtgcagaggagagatatgaaccagcctctgacaataatcatcccgatccagaagggtaattcgatgccctttttgcgccaaatactgtgacagattaaatcccacaaatccagaagcccctgtaatcacaatgttcacacacgattcccccttgcgatttatacaacgagtgcaatgaagagagtatatgtactgagtataaccttaaaatgatacattttgtatcattttacaattgttttttgttcgtccttgaggttatcgggtaatttatagtgaggtgatgtgagatgaatgaacggaaaaaggacatagagacgttattccttcaggatgacggtgtaattcccaatcatccgaccctgcctgtgcttttgtataagaacgtatgggctgaagaggcccttcacgcagaatcgttgctgaaccgtaacggatggggaaatagctggttgaatggtgtgttcaattatcatcattatcatagtaatgctcatgaggctcttgctgtggtgagtggattcgtgaaactgattttaggcggagaacatggtcagaaagtttaccttcaaacaggagacgttgtcgtgctccccgctggaacagggcataaacgtctggagtccagcactgattttcgtattgccggtgcttatccgggcggcatgagttacaacacacgcacaggtgaggaagacgagcgacacaaggctcttcaggaaatccaagaagttccgatcccgcggactgatccggtctatggacagcacggaccgctactagaaatctggaatgggaagaaatcataacagatatggagataatcaagaagcatgttattggacaatgcacaggagaagtcgttccagtaatcaagcatgaaaaatagactgttccccggacaagtaggagaatcatgccggagtacagtctatatgtttttctttaatttctaatctatcgcacgccagcaaattttagttccgctccatactcgcaagtcggatactgtagtacctcatcgcatgtggcctaccttccatctccagtcgtccctgcagtacgagttgacgtattcgatattcaataaatgcgtctcccacagtttgttctaaatatccaagtacttcacctacaacacgggcacatattataaattcatcaggttgtctggttatcgtaagatctctcaccttttgcataatgaaatcatcaattccgtcctcggacacgctatgaatcttactatccttcattattcgcagatggcctggttgtttagagagatgatcccactcttgctccatctgcttgcgttcttctgaagacaccggctctgcatttgcacagtggttccacatggctaacaacttctcagatacaatctctcctgttctccaaacatcatactcgatttctgggttatggaataactcctgatacagttcacttgtctcgatctgataaattggactcttcctgttacgcagcaaatgcatagcatgcagaagacctgttttctcatgagcgttattagcataccagatggttattctggtctcttcatcgatggaactcatcacggtatttaattgaatcagttcatctacgcctttgatagcgtaacttccgtgttcactcaaataaagtcgctccagcaaccagaggtgtctacgttgtaggactatcttatcagtaagatctcccaatgggccaatcgcatagtagtcattcatagaataaaaacgccgctccaagcgtccaggaacgctacccatggcaaccttaatgctacccaacggcgattcaccaatcgctatatgaatttcacgcggcttctgtgtatcaagcaattgctgctcagcttgcttcctatccctttcttcgtttaacccctcaaaaatccgctgtacactcactgcaaaatgaactgaatgttcttctgtctgatgactgactgccatgtccgccctaagatagagcatacgcaataatgaacgaagctcttcttcattcatgcgatataattctttatcaaagtcaaagacattttcaatcatactgatcccccttaaaaggttcatctcgagtaattcataaataccaaatagatataccactgtaccccgaaactaggaggagatcgattttccagcgggttgattcagatcatgcagatcttcaccatctgacgatgaccttgtaaagtgtcgctccagtttgcggcttgcccacagggatatcgcaataaacagcaatacgcctacccagcgtacagggtgctccagaaattgttccacattggaaccgatatacgtaacagagaaaatcatgatcgctttaccacagcccaccgcaagcaggaaagataataatcgcattcgcgcgatacctgccgccacgttaataatgacaaacggacctaccgggaagatactcagcagaaaaacataactgaatgcattccttcgaatccataccatgctgcgttgcacacgaggtttgcgtgcccatcgttccacaaaagcggatttcccaatctcccgtacgatcaggaatgtaacagtgcaaccgagcaccatgccgatccatgaatataaaaaccctgcccacagaccgtataccgcaccgttcacgcccacaatcaacagcgttggaagtggcggtacaaatgatttcataaacgtaagcaaaattcccggtaacgggcccagggagcgaaacttctccagccagaaacgaatattttcttccgtaatatatgacataatgtccaatgctgccggggtcatctgcatccatccaatctatacagtctaagttcttaggcttgatgttcactatacatttcatcattcctatggatgatgaagcttctttagtaactccctcccagtataacgtacatcttcgatgaacaccgttgtcaatttgaagaaattattgcacagcgaactgacttcccaccccaatcaaaattaaatcaaaaaagcacacctcgacctctgtggtcttggtgtgctctttatatcaaaaccccgattccatcttcggggcaattatccttcttccagctgtgcttcctgcatggccagttcaatcagttctgcctgatgggcagcattccattcgggaataccggaacgcatgaactcttcggcatccatcgctgctttggactggttgcacagattacaggcgcagacacagttgagcggagtggtatgtccacctttggcacgcggcagcagatggtcaatcgtatctccatacgatccacagaagtaacaggtgtagtgatccctagtcagaatataccgcttgaaatccttgttgctgaacaatcggcgaatcgtgtaccgattcaccaccacagcggctttttccttcactagcgtgaccgcaagctccatgtccacttcctgatgccagcgtctgcccttgtccgtcttccccctcatccgtaccatgccttgacggttggtccggagcgaagccggatcttccgggtcgatagctaccggagccgacggggtctggcggcggggacggccatccgtgccagccccgtgactacggctggcgtgcgcgggtcgctgcccggatgcaccgcgggcagtgtcttcgacgctcgccttaggcgcacgctccttgcgcgtctggcgcggcttggaccctggcgagccaggctggcgcacgggcgcaggaggccctgcctccgcagcagcccccggcgcttgcccgggctcgcgcccggtggcggcaggctgtgcctccgccgccgtaggtgcagcgaccgtggtggcatcgccacggtcgctcagtgccggcgcatgggcctcagcagctatgctgcgggcctgccctgcgccgggcgcgagcgcgccagcacgtttgcggcgccgcttgcgcttgcgtttggctgcggtcggttgatccgcagccatgggctctgctgccgggccttgcggctcagcctgcagcagagcctggtgggccgccgcagtctgctcggcggcctgcactgcagcggctgctcgcgcgccagcccgctgtgcactgcccttctcattcgcagcagcatgcccctgcgaatgcccttcttccccacgccaatgctcacctagctgtggctcatctcctacctcacccgccaaaccatcatgctccagactcgtctctctcagctcattgcccgttatgctctctgatcgcttgctcttcctccgtcttctcctcttcttccgaatacccgaagaagagggtgaggaagtcaccaagtcagcacgttcatcgtcattcgaagaattcgagtctactgaaggctgagacaccagacttctttcagactcagacaccgtagcagatccctgctccataccatgggaggtaagacctgcctcatttctcgcagatgcagagggtctggcagtaacagcacgtgtctccaagccatcccgttgatgctcgatccgttcattcgttcgtccgctcacgcttgaacctgactcgtggtcagcctgtccaccaagctggcgacagctgcggcaggctccacgcctggctccgggacctgcccgctttccggttctgcgccggaattcggacatcggccgctgttgtccgcaatacatacacgttttgctcagtcgcgcttcttgttccgtctttccttgccggaaaggggctggacccgtctccatgttgtcacctcggttccgtatgaatccggtttctttctattgtatcacatctgctcgtgaacaccctcatggccataggcctgataatctttcgagttgtactcctgtgtctgttcactgcattcgtgaagaatgtgttccacatattccaatatatcctgcatcggtctcccgcatttttcgcatgttgtcattatattcaccttaatcctgttatccataatgtattatcgttccgccttatgattacccctcttacatgaaaaagaaacactcgttccccatattacacatatctgcatacatcaaaaaaaccgcttcctgctctcccctaaggtcgaccaagaaacggtttattattcctgtgttggaaatgtatcttaacgaacgtccaattgccccgagttctgttgtgggacgagacgtggtttgggttttggcagattgccaaagatgacccatgcatatggaacaaaccttgccgtcaatccaacgacgatccacgaagcgattagagctacaccgaatcctccggcataccatagatgcactaaccacgatactcctgtttgaggtggataattccgatacaccagcaggaagaatggatgaatcagatagatgccaaaggacaatgccccaagccgattcagcggcttgacgatgagtgacggccctttgcgatagagcagataggcaatctggataagcaccagcgcacaagcaaaggtatgcacattccagaagaattcataccacagtgtgttatacgttgcgatcttcagacgcagcaggtaatagatatacacatggccaagcccagcaatgatccataccgcccagagcagaatccatgaagctacgcgtcctttggttgcattggctcgactgatgacaaaccattgcttgattttagggaagtacactccgataaaagcacccagcatgaaataggaaaagtaggagaacgcccagcttcccttattgggtacctggaatccatatttattacttacgatgaatgcccattgaatcaatagtccaatcggaacagaccatttcaccacagaaggatatttcttaagcaaccataacaccaatgggaataacagataaaattgcatgttaataaacacaaagtacagatgagtatatgccttacctgtaaacaatttcgtgataaaacttactgccgattcgccgaaaggtcggccctgataatgcgtgaaatgtagcaaaacaaaatacatcaatgaaaacaggaagtacggaagcaaaatatacacaaatcttttcttgtaaaagttactcacaagtttcttatccagcggacgagaataatagttatagaacagcacaaaactgctcataaaaataaaggttggcgtaccatatttcataaagatattaataaaattgtacagccagtagtagcctgagccagtcatgtccaccgtcgcataggacgtggaatgcacgctgagtacgccgataattgccaaggcacgaaccaggttcagctctggaattcgctctcttttcagtgtttcactcattttaaagtttctccttaatgtgttcgtcaatatgtcagatatgacttaatacaataaagctctctatctattaaaagccatattgcttaagatgggtagtccaatttcttaataattcctaaattttcaacacatttcacactattttcatgtctatatatgtaaaaaagaccgcgagtacgcggtctgtggaacatcctgctctcaaccaaatgaatattggatcaaccggatgagaatggtaaatttgggtttgggcatgcatcccgccctgactgagtctacttcgcacgactcgccagaatctgtttatacacgtcaatagctgcctgtctcgatgccttcagatcaacaatggcatctttgcgtggctgatggatgtccttgctatgcagatccttcaattcaggcaaccatttgcgaatataatcaccttgcggatcatacttctcggattgtgttaccggattgttcacgcgaaaatacggagccgcattctcaccaagcgaggcacaccataaccagttaccacggttttgaatgttatcatagtcacgcagcttacgcctgaaataagcttcgcccagggtgaatgggcattgcaggtttttggtgagaaacatcgccgtgagaatccgcagccggtttggcatatgtccggtttcattcagttccgtcatcgctgcatcaataatcggaatgcctgtctccgccttgcaccaccgttcaaagtaatcatcatggagagccgagagatcgtacaccttttcatatgtaaaatagtgactctcatagaccgctcgatacagatagaagtcgcggaagcacaactgcctgatccattccccagcctcagccgtgcgactcgccgcatcatacattttgcgaatggatacagctcccacagctacgtaagaactgagatgactcggctcgtacgcctcatattcatcccgatgatccccgtattcagcaattcgatccgacaaaaattgatccaacagcagatgcgggtcctcgtcattcgaaccactgccctccagcaactccggaggtacctgcattgcatccggccattcaatctgacgatcactcaccttcaacgctgcaaccgttgttgccgaaggagggttgggatgttcattcatgaattccacccaacgccgatgaaaagccgcaaatactttataaggctccgacttgcctgtaaaattggcaaatccattcagatccatcagcagatgatccgtcagttgtgtgaacgtaacctcgtgcgactcactgactttgcgtatggccctatcccgctcgattgcatatggcgtcatgtcccgatggaccacaatctcgttaatctcacctttgaattcgttcaggatgtattcaaccacttcagccggtttgccgtaagcaacatacagttttcgtttggcttcaagatactgtctgcctaattccgctgcgtgctgcctgaaattcacaccgctgtgttccttctctcggccttgccgcaggaggaatgaatcatagatgagaacatgcacactctcttcttggtgttcccgcaaataatcgaatgcggccagatcatccgtacgcaaatctttgcggtgtatgaatagcttcatgctcaccctcctgtctgaacttacattacataggtttatttgtccgtcaggttctgatataacctgcttgtttcgggctcgggctgataccccagatcctcatttaatgtcaatgtaaatgaatcatatatacgaagtatgccttgctgatcatccatggatgcatacacttccatcatgagtcggcagatctcttccgaataaggctcccgttcctgtaatatcgttaactgctcaatcgcttccttgccacgaccatgctccatgtcccatctcgcgatatccataaccagcgctgtatacttgcgtctgagttcccttgctttcgcctgtgcccaatgataatcatgctcttccagataatcgccacgataaagcggaatcatatgcctcaaatcatcgacattgtcggatgtgatgacgtggtaaaccatggatttttcaaattgatccacatcacttaccagattgcctgataacagacgataacggttcatattgtactccagcttgcctgtcatgttccattccttaagcagctttcgaatctggtacacggaagtatgtagatgggttaatcccttttcctgggaaacatcaccccatagcttatccagcagaatctccttgcttacccattcttccctgtgatgaaacaaaaaagcaaacaattcctgtgatttggttgtgcgccacttatgtttcttggcaccctgatccaagcttctgtagatatccagatgtttgaacgttagcagccccggaacttcagtatccaactccacagatacagattccgatgcctgtacctcggcggtggctgcaacttgggaattatgcgacattatgtccgcgattcgatcaacggttttggccaatcgggcggagcttaccggtttcagtacataatccagtgcatgcagctcgaatgcttccactgcatgatccgcataagccgtaacaaagataatacgaatactctgatccaattgctgtatatattcagccgcttccaggccattcatctccggcattccaatgtccaaaaatacaacatctacacgttcctttgccagaaaatgcagaccatcacgagctgttgaaaaacattgcacgggtgtaattcgtccgtccgttcgtagtagtcgctccagatgaagctgcgctggcttctcatcatcgatcacaatggctctcaccgttctttcagcctcctgccatgaaagattcaataggaataccgattttatcggcatccgcttattagtctgttaaccataattacttcactcagcacactaattggaataatccaccttttgcacggggatacggaatcggatctgcgtgcctttacccacatggctatgaatctccagcccctgaccatagagagacatcaggcgacggtttatattttgcagccccacacctcccggaccttccgtacgcccagacttgacctgagccatacgctcaggagggatacctacaccatcatcctggacctggacgactacatgctcgctctctttgaaaatcctaagatgaactgtcccgccggctgcccgctccatcacaccgtggcgaatggcattctccacaagtggctgaatactgagaggtggcagatacagatgtacgtccgattccacctcatactcaaccaccagtctttcctcaaatctcgcctgttccagatgcacataagactccaccaattccagctctttggtcaaaggaacaagctgctccctgttctgaaagtcaaagcttccgcgaaggtaatgactcaattcaatcagcagatcggttgctttgtcgggattcactgcacaggtcgcgataataacattgagtgcattatatagaaagtgtggcttgatctgggcctgcaaaaaggccatttccgtccgaatagcctcctgcacagaactccgcatctcaattaacgtccgaacccgggcacgcaattcaccggcatccaccggtttgctcaggaagtcattggctcccgcctggaatccgtgtttgatatcctcaggcaacccacgggcggtcagcatcagaatcggtaactccgacaaggaactgtgctcgcgcagtttgcgacataactcaagcccggacatcttaggcatcatccagtccgtaataacaagatcaatggacgggaactcctcacggagtttcaacgcagtggaaccgctgtccgctgcgatcacgcgataccgctccgtcgacaataggttaagcaatacctgtcgattcacgggatcatcgtctacaatcagaatcgtatgctccgcttccgtaagatcatcctgctcatctgactctcttgtcacaagctccttcgcccctgccccctgtgcagcaacatatcgggcggcagctggtttcgaatgagtttgcaaaagtggcatcttcataacaggcagggtgaaatgaaaggtcgaaccttgccccggctccgattcaacccagatctcaccaccgccaagttcaacgagttttcgcgtaatactcagacccagtccggttccattattcaatcgctcaatcgtgccgttactctgctcatacgcctggaagatatcctcctgtttgtccaaggcaatgcctacccctgtatcagcgaccgataccttcacccagtccccttcaacgctggcgtacaatcgaatctcaccctgctcagtgtacttataggcgttacccagcaagttatacagaacttgccttaggcgatcttcgtctgcctcaacaagtggcaaggactggggccattgttgaatcaatataaccggcttgtcctcaaacgtgaaacccgagacttcaaccacagtacgagcaacggattccagatcgacagctacccgttttaactcgatctcactattttttaatttggcaaaatccaaaatatcgttaaccagcagtgaaaggcgcttcccggttgaagtaatcatggagagatttttcgcttgcttgggcgtgactgctccagccgccccttccagcatggattgcgcaatattaatgatgccatgcaggggagttcgtagctcatgagacgtattcgccatgaactcgtccttcaggctgtcgatggccagcaaacgctccgacagagcttccacgtctcggaatgattgtgcaaagcggattgcggtcacaatcatctgggcaaatacaaataataaaagttcaatcagcgcaaagaacgctgtgtctagggtagtgaacgcaccaagcgtatataacacaacaaccatgagtatgctcatcatactcaccagtgcaaagtggctgtcattcggccgtcctttcaaccaatagaaaatggctcgcagcgtatataacatgacaacaagtgagatcagcaacatgggaagctcaagagacgagaaaagcgttggaggaagcgtaagacccacaatagtctgggtaacgattagcacgacagccagacgaacaaaccactgatgaactgctcctggtacacgggcatccatataccgaagcaaaaaataataggcaaaggctgaactaaggagctgaatccgaagtatctcattattggtcaggaacggtacaaacgtacccagtaacttctccccatgtgttagagcgtacaccgcaccagaaaggctgaataatccgagaaaacgaagctccttctccgtacgtcgtaatctgaacagaagtagaaaaaaggcggctggcaagataaaaccgaataaggccatcagatccctgagccaatcttgttgctgacttttcagaatactatgctcgtctccaaacaaaatgggcgctactatgcccccggacgagtaactataatttgatacttgaatgataatgtcagccgtattgccctcaatggaagtgaatcctgtaaagggcagatttaattgtatatctgttgccttggtctttcctggcaggcctttgccgccaatctctttaccatcgataaatacccggtgggccatgcgtatattctgtgtgcgtataccataatcatttttcatcgtccggggtgtaagctgaacttgcaaatgataggttccatacccatgggcctgccccaaagatttgttccatcgggcaggaacttgagtgcccgacgaagccggcaaaggcttgcgaccggatacacttgcttcaatatctgccgggctcagcaactgcccagggtagaaatcccagacaccctttagagacgctgcacccttgcgatcaaagtcccattgggtcaggtcaattttcccatctgtagcctgggggttaatccgctcgctaattaacgtctgggcgatccaacccagtggaacaatgacaatacatatgaagcttatggtcagcataatccagtgttttctcatctatgtattccttccatccacaatggcgagagacgtctaattctgtcgatttatcactataattcatgttacacgtttctggtgctcacggaaatagtttccgtatcataatcggtcaaattcgttataatttgaaggatctctatctgtttccgtcagctcttggtacaccaaggaaccccatgccgaatttcaccggaatgaacgggcgaaatggcctggggttgattgaatgaagatttatttaacaacttgggcaagcttctgaacgattccggcccatccctgttccatacgttcgcgtacgatagcgtgggcctgtccaaactcggtcagtttatccgcatcccaaccgctgtgaatcagtgtgaaatccgtaccttcgggctgttcattcagttggaacgtcaacgtccagtccttaccccagcggaatgacagcttgtgcagcggaagaacttccgtcacctgacatggtgattggccgaaggggcctgcttccaatataaactcgtgaccttccacgggttccagattgcctggcatgaaccaggttttcagtccctgctcggtcgagaccatttcccacaccttctttacaggtgcatggagcataagttcctgccggatatctggcagtgcacttgatgaacttgatgatgaatccattcgaatcacctccttatacatttcatttcgtataactatccgaatagaagttgacctccgctttatccccaccctataattggaacatattccataaaaggtgcgtgattcctatgatagtctgctctgaaaaatccaattccaaccgttgccggaagggataatcctgctcattccccttccacgtttttattttaatacatttacatgtgggggacacctatactatgtcattcagttattacggtccattatgcaccgccgtttatgatctcacgaaacctgtgggacactccttgggaggagacattgaattctatcgccattatcttcagcgctgcaatggacgtatccttgaagccatgtcaggatcaggccgagtgctcattcctttgcttgaagcaggcttgaaggtggatggaattgattattcgaccgatatgatcaactcttgccgttctcgttgtatggagcgggcattacccatgcctgagctattcgttgccgatctggagaagcttgaccttccatatcgatacgaggcaattatcattcccggaggttctctgctcctcatccaagacagacaggcgtcgattaacgcattgcgtagtctatttcagcatttagaacctggcggcaggctcgtgtttgatctgtttctgcccgatctgacacaaccctcttctgtagaaacatcaaccgtttcattacccgatggtgatacgatcacggtagaagtgaaaaccattgaagtgaaccttctacaccaatataaagtaagtctgattcgctacgaacaatggcatcagggtgctcttgttgctacggagctgcaacaacttaccttgcattggtacggcatagaagagttacgcctaattctcgaacacattggtttctctgacattaaagtgtacgccgactttaacccggatcaaccacccacgcagtcgaatcaaaaattcgtctatgaagcaactagaagagcgtagtcatccgtaattgagtctacatgcttctcatcatacaaaatcaggccacagcatgaggttaaacccatgctgtggccttttttactatataaaatttgcactaacatttacacgaaaacgaagaggacagaaataacttgaagaagcggagcgttcgcctaaaagctttctgaaagaaagctacatcggaagcttacgctatcatcagattttcacctttgaaaaagtgaatcaaaaaatctgaggataacagcgatcggaaggttattctgtcatcggagtggcaagtgtaagtataatttggagcagattagtatccacgagaatattgctctgcaatggcagcttgatccttgctgacacccagttccagagccgcatggttcgcccagtacggatcacgcaacatgcctctaccaaccgcgaccagatccgcatcgccgttgccaatcaccgcctgagccaacgctgcatcctccagcatacccactgcgattacaggaacgttcagttcttcacggaaacgacgggcaaacggtacctgataccccggatagttccccggtttccgctgtccggaaggaccttcgccacctgaactgatatggaacatgtccacgcctgcatcttggtaggcacgagcaatattgatggtgtggtcgatatcgtatccaccatccgcgtattctacagccgaaatccgcaaaatcagcggcatatctgctggcatttcttttttcactgcacgaatgacctcaacgccaaaacgggacagatcctgcccatatacatcctcacgatggttcatcagcggggaatggaactggtggatcaggtatccatgtgcaccgtgcagctcaatggtatctactccagcctgcactgcgcggcgaacaccgtctgcgaacttttgcaccatagcttctacttcttccgtacttaacgcacgtggttccttgtacttttctcccgggaatgtaactaccgatggggcaaccggctgtggagcatcctctgcttttcgtcccgcatgtgcgatctgaatagctactttggagccgtaggcatgaattccatctacaagtttggtgaaggccggcacatgctcatctgaccatatccccaagtcattatccgtaatacgtccatccggatctacatcggtcatctcgattacaatcagtcctgttcctccaaccgcacggctcacatagtgaacctgatgccaatcgttcggaatgccatccttcgctgtgacagaatattggcacatcggtgccataacgacacggttatttaattgcagactcttgaattgataaggcgaaaataattgttcagtcattaatgttgcatctcctgttccatgatcatgatatatatgaagcctaacttatttgtctaagtccgaaaacagttttccgttcttgccgtaattgtccttctccaaatcctcaatgaagataaagactttgctcggatcaacatccaatgtctcacaagccacctgagtcatacgttcaatcaactgacgtttctgctcgaccgacttgccttccagtaccttaaccgtgataaacggcatgtcttgaacacatcctttcttcatcatttattatgaacctgacgtatagaaacacaagtacgtacatttttgtgccttggtaccctttttgatacctagttatcctcacatatttcggttctgccccattctggaaatgactgcaaaacatgatatgataaccgtagagaaccacaataattactatacccaatttacataagttgtgactaacggttacacgataacggagagggcagaaataacctgtagaagcgaagcgctcgcctttatcctcagattttcacctttgtaaaagtggatcaaaaaaatctggggataacagcgatcagaaggttattctggcatcgtagtggatcagtgtaaaacaagtagctcaacttatatactactcaaactagggagcgataatagatgaaagatatattaattcaaagactgagtacttatgttcagatggatacccaatccgatgaaaatagcgagacatgcccttccacacccggccaactggccttgggcaaactgctcgttgaagaatgtacatccattggtctgcaagatgtaacgatggatgagaacggttatgtcatggctacactgccatccaataccgacaaggatattcctgtaattggtttcctggctcacctcgatacagcgaccgactttactggcaaaaatgtcaaaccacaggttatcgataactatgatggtgctgacattgtgctgaactcggaactggatgtagtactgtccaacaaagatttcccagaactgcacgagtataagggccacacgctgatcacaaccgacggtacaacattgcttggtgcagacaataaggcaggcattgctgagatcatgacggcgatggcctatctgattgagcacccggaagtgaaacacggtaagattcgggttgcttttaccccggatgaagagattggccgtggaccgcacaagtttgacgtagctgcttttggagccaaatatgcttacacagttgatggcggaccgcttggcgagctggaatacgagagctttaacgcagccgccgccaaaattaccgtacgaggcaccaatgtgcatcccggaacagcgaaggataagatggtgaactccctgaaaattgcgatggaattgaatcgacgcctgcctgtggaggaagctcctgaattcacagacggttatgatggcttctaccatctgttgtctctggagggtgacgttgagctgacaaagatgagttacatcatccgtgatttcgaccgggagaagtttgaagagcgcaaaacaaatctattgaatatcgcgaacgaactgaagaccaagtacggagagaaaagcatcacggttgaattgaatgaccagtactataacatgcgcgagaaaattgaacccgtacgccagatcgtcgacattgctcatgaagccatgacccgactggacatcgaacctgttattcgccccattcggggaggaacagatggttcccagctatcctatatgggcatgccaacaccaaatatcttcactggtggtgagaactaccacggcaaatttgagtatgtatcggtagacaatatggtgaaggccacccgtgttattgtagagatcgctcaattgttcgaacaacgcggagatatctaatccacttgaagtgcagagcaaaaagagcaccccttggtttattcgtgagggtgctctttgttgtgccgtattgtattttattgtgtcgcgtcatgtcgcttagatatgcaggcttggtctttattttaaaataccatcactcatatatattgcctcctgcgatgacacgcaactgttccagatcacagatcactagctttcgctgcactttgcgaataatatctcgattacacagatcttgaacgactctattaagatgtctatagctagtgcccagcatatcggccagttcggtgagcttggaggtctggatctcttccgaagaagactcgtcctggcccattgtggacaacagatagctggcaaatcggctctcgaccggatataacatattcagactcgacaggttggaaaaggtatacaatttgtgcgtaacttgactcagcataaagtggagaaacttagggttctctgcatacgtattctggagagcgcgatagctgatacccagcaacaggcttttgctcaccgactctaccgtattcatagcctccttgccatttaccagttccaaatctcccacaagcgccagtggtgtactgaaacgaagcaacagagacttgccgttaggcagggtggtatagatcttgagtttgccctgcacgagaaaatacaaccgctcgggtcgttcacctttggcacatatcatctcgcccttcgcagcctcaagtagtcgcaactcagcgagtgcaggctcgtccagcacctgatccaacccatgctcacgggcaagttgccgcacaagcccaaagtccataatttctttcattccgacttccctccgttgtcgtatataacgtatgtaaaaggacatatgtcccataattgatatacattcgtacaaatatcttgatataaaaatagttacaactaacacttatatccaataaatcattttagatgggaaatattttaaaatttaatcataaaatgttcattctttcatgcaaaatgccgttcacgaaaagtcatttccgtccgatgaaagatagagcattccatagatcgttaaaaataatacattcaaatattgaaaggatggtcctcttccatgaacgttgtagatgccctgcttaaagtaatgccttatatcagcctgatcctcagagaaccagctagtttaactctttacgatcacgaaaaagtattagatgtcattatgacagataaatttgatcttggttttgaaaaaggaatgtcactcttggaatcgtatcaaaactttgccatcttaaaaaacggaagagaagctactctcgctactctctccaaggaagtttatggtatcgaactggatattctgaacattccgatctttgatgatcaccagaaagttgttgctgttttctgtgtatcttacgaccaatctaaccagaaccaacttgaagacattatacaagaaaatcaaaccatcaatggtaacctcgttgatatggtgcagcatgtcgccgctcatgccgaagaattgcaagcaaccagtgagcagatcttgcagaataccagacttgctgttcagaactcttcccaaatcaacaaagtagccgggttcattcgtgaaatctctgagcaaaccaacttgcttggcctgaatgccgctattgaagccgctcgcgttggtgaagctggtgccggcttcggtgtggttgcttccgaagtacgcaaactctctgtggatgccaaacaagctacaagtgacatcgacaccagtctgagagatgtacaacaggtcatcaaacagatggaagttgaagtctcccagattgcagcctcttcacaggaacaagcaacgcttgtatcctcctttacggatgtgattgagcagcttaatgaaacaggggagcgaatgaaagctctgtctgaacaactgatcagctattccgttaaaaattaatcaaaatatatctttgatgaactttggctagtgcaaagatacattttatatgcaacaaacaggactcgggttgcccatgatggataatccaagtcctgttgtttgttgtgcccattttatataaccaactacgttcagataaaatcttaattggttacatgtattgatttatctccaataacttcttcttccgactgccagcattccacttcacccggaatatgaattcggtcccgggtaaagacgggatcacgtccttcagccttttgtttcttgtagtccttcaacgcttcgaaagtcaccttggacagcatcaaaattgcaatcaggttcaccaccaccatgagccccatgaacaggtcagccaaatcccataccagctgtactttggctaccgctccaaacaccaccattgcgataacgcaaatgcggtatacccacagccaaactttgttggatttgataaactcaatgttggtttctccatagtaataatttccgattagtgtactgaaggcaaacaggaacaccataaccgccaggaatcccgatgcccatgaaccaatatgtacacttaatgcagcctgagttaattcaatgcctcccagattggaacctttgtataccccggataacaaaataatcatggctgtgcttgtacatatcactaacgtatctgtcagcacgccaaacgcctgaataagcccctgtttcaccggatgtgttgtatccgccgttgcagcagcattcggggcgctacccatgcccgcctcattggagaacaatccgcgtttcacaccgttcatcagcgcagcgcctaacgttccgccagccacctgttcgatgccaaaggcatttttgacaatcaacgcaatcatggccggaagctgggtaatgttcgccagcaccacaaaagccgctaccccaatgtacaatacggccagtacaacaacgatgtattccgatgcttttgcaatccgtttgacgccgcccataataattcctgcaaatatcactgccataatgatacccaccgttaaccgatccgtgccaaatgagttctcaaatgcaacagtaatcgtgttagactgcaccgcattaaagaccaaaccaaatgaaagcgtaatgagaatggcaaataaaatccccatccagcgtttgcccaacccacgttccatataatatgcaggaccgccgcggaatccgcccttatccttcactttatatatctgagccagcgtactctccacaaaactggaggctgatccgataattgcaatgatccacatccagaatatagccccaggtccccccagtgcgatcgccagtgcaataccggtaatattccctgtacctacacgggccgccatactaatacagaacgcctgaaaaggtgaaattttgcctggttccttgctttttggctctagaagcaccttcaccatatctccaatcatgcggaattgcatgaatcgggtcttggtggtgaagtatataccacatactaccaatagtataattaacactttggaccatagaaaatcattgaaaatgacgacaatatcttgtattgtttgctccatcggtatgccccttttatggtgtatttcaaacacagagatggtcacgtgaaaagtttgtaccattctgcacaacactagccccagacttcaggatgttacttatactacaagggcatctacggaaatcgacaaatacctacatgcaattcctacatttattttaaaaatgggctttgaccgcccaatcattgtcatttaacctgacatgtcaggttctatgcaagaaggaaaggaacgattacactggaatgagagttcatcgcggcgttaaccgtctttaccatagatttatcaatcacaccattcgcagagaaagggaatgactgacatgcgttattttatcgtggatgatgatcctggcgttcgttccatgttgatggatattattgaggatgaaggcctgggcgatattgccggggaagctgaggacggagcacatattcacgcggaactgttggaactgcataaggtggatgtcctgctgattgatctgctgatgccccaacgagacgggattcagactgtgcgagcgcttgaaggaaggttcgagggcaagatcgtcatgatctctcagatcgagtcgaaaaatatgatcggagaagcctattcactaggcattgaatattatataacgaagccgattaaccggctggagattctatctgttctgcggctggtgagcgaaaggcttcgtatgcagcaatccatcgcagatatccaacggacattgcagggattgtccggtttgaattctaccgaacgtactgccgctccggttccagacaaaacaatcacgactgctggacatttcctgctgtccgagatgggcatgatcggtgaagcgggcagcagggatctgctggacatgctggaatatctggaacaggtagagacagatgaacataagctgtccccctatacgttcccatccctcaaagacatcttccagaatgtagcgatacgtaaactgggagaagacgcctctctcgcagaggtgaacaaggagatcaaggcatcggaacaacgtgtccgcagggccatcttccagactctgagccatgtggtttctctgggattaacagattatacacatcccaagttcgagaactatgcatccaaatttttcgattttaccgaaattcgcaagaaaatgctggagctgcaaaacaacgtggagccttccttgtcccagacacgcattaatacaaaaaaatttgtgcaggtcctatatttggaagccaaacgattactgcattaaacagatgcatgatggatacgatgcaaaaacaaacgggcatgaatattacaccggtaggataccgcctcttcaactgaggctgtccataccggctatattcatgcccgtctgtacgatcaagcgttacaatctatgtgatttgttccgtgtataaaattaaaatcgctttgggtttaggcccgtgaatggtttcggctaattcggttatactcattaatcaattcgtccaatgccatagactgccgaatcacatcgggatgcccaagaccacccttgttatgctctaccagcatatgaaggttatgtctggccttctctattttatttttcaaatccaaactcataaccatgacccctgatacctccttattctgtgaaccattttagtttttcctgtcaatctatagttggattaacatatggcataggagacaaggatgttttgtattcttctccaaattttgataaagattattttatcacactagagcttatccgaaaatggctgatatgacgcaattttagtggtattatcgagggttggattctaacgtctggcctcatcattcacggccagaacggattgtgtcgtaaatgtgtatattgaaaaaacaaaaagtctattggttcaaaaggtaataaaatccctttccataatggggtcattcaggtacaatagggcgatgtgtgtgtccggacccggcggatacaaatgatgtaatgtagaggacggccaacgacggccattgatcctgatttgatattattggaggcttatcatcaccatgcagaccgattcacagactaaagtcaaaattgttaacgccgatcccagcgcaatgggattatttgggttggctatcgtaaccctggtcgcttcttcccaaaagcttggcattacagaaggacttagctacgctattccttgggcgatcttcctgggtgcttttgcccagttattcgcatgtattcaagattccaaacgcaacaatacctttggcacaacagcttttggcgcgtacgcattcttctggtttgccatggctgccaactggatgatcaaaatgggcgtatttggctccactctcgctgaacaggccgatggcaagcagctcggatttgcttttgccggataccttgtattcaccctgttcatgacaatcggtgcgattgaagcgaataaagtattgcttatcatcttcattctgattgacttcctgttccttggcttgacctttgacgctttcggcgtagctcctcacattttccacaccattgcagcatacgctgaaatggcgatcggaattgtgtccctgtatggtacaggtgcttcggtactgaacgctcacttcggttatgcgttcttgccgatcggcaaaccgtccggcattttcaagcccaaggcttaatatacagcagtaaaccgccagcgcgccggtccgcgcctggcggtttttttgcagtccaacttcatttgaatatgtatctgaccgacacctatactagggataatagatcataaagagaccctgcaacacctgaaataaaatgtcacatcagccatactgtcaggaggaaaaaagcatgagagagataccgaaaccaacggagatggatcaggtggagaaaaaatatgtacgcgaaacacgttgtttcaagacggcacgggtgttcccaaccgatgtcaacaatcataatacgttattcggcggcaagctaatgtcctacattgatgatattgcatccattgccgcttcgaagctatgccgggtcaatactgtaacggcttcaaccgactctgtcgatttcctgtacccgattaatccaacggattcggttacacttgaatcgttcgcgtcctggacaggacgaagttccatggagatttttgtgaaagtgattcgagaggatctgaagaccggagagaagaaaattgcggcgactgcatttctgacctttgtggccttggacgaaaataatcgcaaactgatcgtaccccgcattatcccggagacggaagaagagaagaaactatacgagaccgccccggatcgggcggccatgcggaaacaacggcgggaagagagcaagaaattcgctgacttcctgaccgttacttatccttgggaataaaaacacgctaaaccataacaagattgaacaccagcattacattatctggtcgatgccggatagatggacaccgctctgctatccggcagttcaccacccatggagacacaccactgctgatagatgcgatacgctgcaccactctccagtaatccctgacacgtgtatatgccctcttcgatggaattgacacgccccgccgcatacaagcggaaacctccatttaacaagacttgattcacaaaagcaatatgaccctcaccgcttaacacgctttccgccacttcaagctgcttcgcagccgtccagaccagctccggcacgggcatatccagttcataggctgcaggatcaaccagttccagcttcatatcaccgtcttccacggcgtatacgcgggttggccgatcaatatacagatcctcagaaccttccatcccctgtacaacataagcacgccgatagttaaaccgggtgagcaacttcgcaatccgatccagaaaggtattatgaaacacaccaaacaccaaatacggtgaatggttataatcaatcagtttctctgctgtgttaaacaccgttctaaaacccaactcttcccgtaacggacgaagcttacgaagaggttcgcaccaatcctcggaggatacgtacatgacacccaaacgcaatgcagcgctccgtgcatcttcccgatccattttacgtgtatcaattcctgcttcctttaacagaaccgacagcgtaattccccatttgggcggtaaagggtcactcccatgcaaagtcaccggcaacccggccgccgcgagtacaaacgcaaccggaaacgtggccatgaacgactttgttcgtccatcatagggacccgcacagtccaatccatcctgaaatatggagaaacgttccgcactgttacgacaagcatgaacaaaagcttccagttcctcgacgttttccattttcatacgttcagccattagaaacgcagccgtctgggcaggggaaacctcctgtttcaggattttctctgctacggtcagtgcttctgcataattcagatcacgtgagcctcgtttcccacgtccgacctctcggagtatctgagacatatccatggagaatcctccttccaattaagactggagcagttgatgggccttcacaatcgctgtggctacatcgaccatccgttttcgttcatccatcgctttcttgcgtaacaggtcataggcttcggcctctgaaatctgcttcagatcactaaggatagccttcgccatatcaatccacttccgatcctccagcctggattgcaactgcttccgttcctgctcccactgtttgcgttccatgtagcgccgggctgcaaagtgaagagtccagtgaatctcgggcccagtcatggatggtgtaagtattccatcaaatgaggtttcgacctcgcaggactctgcggaggaagaggctgtatctggcgcgcaccaccaaagcagcggtgaatccgacttcccctttcccaggcagttcacccagtactccacatcagccagcgacagatgcaaaatggacgcttcggccgcacgagctaacttcaccgcttccgcctcactgcccgccacctttacatggtacccgtttgctcccagcagcctctccggtgtcagagggattgcatcggatgaggcagctatcgttggttgaacacggatgaccaataaagatcgcatgatggatcaatccctcccctattgctataatcagagtccacatcatttaagacgttaatacatgaaagcaataaacatgttacattacctaacaaaaattaagtagtgacgattatgcgtcttatttttaacattagaatgatcttttcatgcctcatcatgttgcaataaaaaagggtgaaacactatacatggcaccttttctacagtatttatcgtatccagcgtgctaacgttatctaaatccttcaaactaagaagatatactcgtaaaacttcgtcgtccattcgatattccaataaactcatgtaaacataattaactttaaatttcaaatacttttttatgttaactatattgacatggttagatcgatcttttatagttaagccataacaactccatatttgaatcgatcacagttacaacggcgtagctggttgaaacggcaatgaagcctgttttgcaatctcggagcaagggatgcgtatgtatatgcgcagtcctccgaggcataacaggctttttcgattttagagacaaggttttgaggcattttgcagaatggacctaagggggctaatcataatgagtacaacgaaaaaactggtgctggtcggcaatggcatggcgggaatccgcacaatcgaacatatccttaagcttgctccacacgcttatgaaattacagtcttcggcgcagagccgcatcccaactacaaccggatcatgttatcttccgtactggctggcggaacatccatcgaagatatcgtaatcaatgagtggagctggtacgaagataacggcattcgggtgtacccgggtgaccccgtcgttcagatcgataccaagcacaaggaagttgtatctcaaaatggtgtacgcgcaacctatgatgagctgattatggcaaccggttcacaggcgttcatcctccctcttcccggagctaacaaggaaggcgtgatcggtttccgcgatattaaagactgtgaaacgatgttggcagcatcacaaaagtatcgcaaagctgccgtcattggaggtggattgctaggactggaagcagcgcgggggctgctcaatctgggcatggacgtcacagtcatccatattaacggtcatctgatggaccggaacctagatttgccggcaggtctgatgctccagcgtgagcttgaagaacagggcatgaagtttcttttgaacaaacataccgaagaaatcacaggcaaacaacgagtaaaagccattcgttttactgatcaaacggtgcttgaagcggatctggttgtcatggctgtcgggattcgccctcagattgaactggctcgcaataccggcctcgatgtgaatcgtggagtcattgtagatgattatatgcataccagcatccctagtatatctgccgtcggcgaatgtgcagaacaccgcggtattgcctacggactggttgctccattatatgaacaaggtatggtgctcgcaaaacgcctggctggcgcggcaaccgaaggatacgaaggttcagtcacttctaccaaactgaaagtatccggtgtggacgtattctctgccggacaattcaaagacgctgcggacactcgcagcattcgtattcaggatgacgttgatggtgtgtacaaaaagatggtgatcaaagacggacagctgatcggagctgtattgttcggggataccacggatggcgcatcgctgttttccctcattaagagtggtgagaacatcagtggtcgggagaaagaaattttgctcggtgtaccttccggtggttcaggctcgggtccatctgtcgcagaacgaatggcgagtatgccggatgacgagatcgtctgtggttgtaacggtgtgaccaaagcttccattggagacgccgttctgaataaaggctgtaatacactcggtgcaatcaaatcctgtaccaaagcttccgcttcttgcggtgggtgcaaacctattatcgaaaacctgctcacatattatgccggtgataatgtaggtgaacaggctaaagaaggcatctgtggctgtacatcctatgatcgggatgagattgttgcacagatcaaggagatgggactcaaaagcgtcaaggaagtcatgaatgttctcggttggaatgaaccggaaggttgctccaagtgccgcccttccctcaactattatctcgggatgatctggccggctgaatacacagatgagcgtgtatccaaattcaccaatgaacgttatcacgccaatatccagaaagacggtacctactccgttattccacggatctatggtggtgtcacttccccggcggaattgatcaagattgcaactgtcgcagagaaatacgatgtgccgttggtgaaattcacgggtgggcaacgactcgatctgcttggtgtacagaaagagaacctgccgaagatctgggaggaactcgatatgccttccggttttggttatggcaaggcgcttcgtacggtgaagacttgtgtaggtaatacgttctgccgattcggcacacaagattccattgagatgggtattcgtctggagaaaaaactcgacaagatggtggctccagccaaagtgaaactcgctgtctccggatgtccgcggaactgtgctgaagccaccatcaaggatctgggtgttgtcgccattgatggcgcttgggagattcatgttggcggtaacgcgggagtcaaggttcgtgcagccgagttgctgtgtacggtgaagaccgatgcggaagtggaagagtggacttactcttacctgcaatattatagagagaacgcaaaatggaatgagagaacagcggcttggattgaacgggttggtctggatcatgtgaaggaagcattggcggatcgggatgtacgtctcgctctggttgaacgtctggaagttacactgggtcacacggttgatccttggaaagaaatcattcaagacgagaaattgcgtaaaaacttcaccccactgtccggtgccgagccggtaacccactagaagaggaggaacagcgatgaacaaattccggattggacaccttgcagatattgatgaaaagggagcacggaccttcctgatacaggataccgaaattgcagtcttcaaactgagcgacggaagtctgcacgccgtcgagaatcgctgccctcacaagggcggcaagctgtcggaaggcatggtgtgcgggacagcggttcattgtcctttgcatgattggaagattgatctgcgtaacggtaaggtacacgagccggatgaaggctgcttgaatacctacaaaacagaagtggacggcaacagtggagaaatcttcatcacaattgcgggttaaaggctagagataccctgacatcaaggaggcgtgcgctatggattttgttaaacctgcagaagtgctgcaatcgatggtcgaagctggtgagagcaaagccagaatgaatcgggtacagatgctgatccgcggttttctggcgggggctatccttgcctttgcaaccacactggcatataccgctgtatctcaaacttccgttggtttggcaggtgcactgatattcccggcgggatttgtcatcattattctgctgggtctcgaattggtgacaggaaactttgcgatgcttccactcgcagtgttgaaacgcagaattacatggatggatatgctccgaaattatttctgggtgatcacaggacatctaatcggatgtgcattctatgctctcttatacggcctgaccattaccaagatgggtacggatatgagcaaccctctaattcaaacgctgatccagtccagtgaaaccaaaacattgggatatcagcacttgggtggggctggcattgtactggtcaccatcaaagccatcctatgtaactggatggtcacactcggggcagtgatggcaatgacgtccacttctacactgggcaaaatcgtagcgatgtggctgcccattaccatatttttcgctcagggatttgagcatgctgtggtaaatatgtttgtcatcccggcaggcatgatgctcggtgcacaggtcactatggctgactggtggctatggaatcagatcccggtgttgttgggtaacctcattggcggagctgtatttacaggcctcggtctatatgctgcacaccactgggggaatccggtgaaactatcgacgaaactggcaaccattcagggtggtcgttcaggtttggcaagttctgatgctgcaccgaaattggggacacgatcatgagccggggcctggttagtattgttggcgctggtcctggagatccggatctgattacggtaaaagccctgaaacgtattcagtccgcagatgtcattatgtatgatcggcttgtgaatgatcaattgctcgccgaagctcgtgaaggagcactccgcatctactgcggcaaggccccaggccttcattccatgagtcaggagatgattggacggatgcttgctgcacatgcggcggaaggcaaacaagtcgtaaggctcaaaggtggcgatccgttcatctttggccgtggtggtgaagaagcgcttgtgctggcggaagcagggattgcatttgagatcattcctggcatcacttcagctgtaggtacatccgcttcatcccttattccgttaactcatcgcgggattgcttcatccttcgcatgtgtcaccggaaccggcagtgatggaagtgtatcttcggtccgctgggatctgctcgcccatagtgtggatacactggtcatctacatgggcattagccaactgccccagattcaacatgaattgcttcaccatggcaaaagtggacacacccctgcggctttaatcgaacggggaaccacctcggaggaacggattattaccggcacacttgccgaactccattccctcgccaagtcgcatcaagtgaataatccggcattaatcatgatcggcgagtccgtcctgatccgcgaacaactgcttcagatgcaacaggccgctaatgcctccatgaccggataatcgaattggatttcttcatctatatcaattgaactaaacatttacacaaaacggagaggacagaaacgacctgaagaagcggagcgttcgcctttatccccggatttaccctttataaaaggaatcaaaaaaatctggggataacagcgatcggaaggttgttctgtcatcggagtgtgcagtgtaaatattctttagttcgattgatatagaacaaaactctcattcgacctttaatccaacagcatacgctcgtgaatagtccgacccttctgccctggttcaatcagcagacgggtcggtttgatgttaatcagcgccgtaagctgctctcccatataatgcgcagaatatttgaatccaatctccgcccaatgcatgattacccctaccgttgcagataccagataacttaacatgatgtcgtaattaatcgtccactcactatcctcggtcaccaatacaaaatcttcggttagatacgttctaaacatattgcatagtcgggagctcatatctgaatgcatcgttattaatgcacgaaagatatcctgatgggcttcaatatattcgaatacaggcatcgtggatggcagcaatgcagtcatgtccacttctttgagctgtgcatatggttctacataagctcgccccactccctgcatgaaatcatccagaatgaactgcaacaactccggtttgccgggaaaatgtaaatagaaggttccccggttgtaatccgcccgttccgtaatatcccggattgtgagggcatccgctcccttttctaatatcaaagaaaccgccgcagcgatgatcgcatcctgcgttcttcgtgctctccggtcctgaggatgttcaatgatcaacattttcgcctcctttgttcattattgtaatataaatgaacaccgcttacacctctgtccgatagctgacatatgcgatgtcaatgattattgtcacattgctatgtatatcttaacattgagacaggaaagatagacgacaggttgaaactttttttgagaaatacctgccaataatgaataaggagcggatagttcatgagtacatcttatacacatacagccgttattacaggagcagctggaggcattggtaaagaattggcacgccgccttgctgagcgcaaaatcaacttggtgctggtggacctgaatgaagaagccatccaacagacgattactgatctgaacctcgacaaagagcacgtcatcgccgtaaaagcgaacgtatcccaagaagcagacgtgaaaaactatgtgcaaaaagcattggatgcttttggtcgaatcgattattttgccaacaatgccggaattgaaggtccaacagggctgatcgaagacctgagtgttgaagcactcgacaccgtatataacgtcaacattcgtggggtattcctgggtctgcaaaatgtcattccagtgatgaaaaaacaaaaatccggtgcgattcttaatacctcttccctcgcgggtctgatgggtgcacctgctgtatctccatatattatgtccaaacatgccgtagttggtctcacgcgtaccgctgcaaatgaactggcaccttataatatccgggttaacgctgtattgccaggtacaatcaatacacgcatgatgcgtcagatcgaagctaattccggtaacgtggaagactatcaatcagcaaccgtgtccagcattccaatgggccgttatggcgaaccggaagaagtcgctgcggtgatgaacttcctgttgtccgaagaagcatcttatgtaacagcttccctttacaccgtagatggcggtatggtgggtcaataagaagctataaacggtgggattgatagggattgggtcgatagaacttgaagtccatccttaaaaaagttataccgacaggtgttcccgaaggaatgcctggtcactacaatctaaaaaaggcctcaacaccacagtattgtggagttgaggtcttttttatagtacaacacttgccattcattaggccgcatctctgaaaatgtacttttgaaacagccagttaacgcctcgttgcaccttgtgatcactctaacgaacctaaggcaccttatttcggcaaaaagcgcttatttcccgaactaacgaatctcagacacgctaattccgcggaaatgctttaactgcatgggaaagtcctaaaatccagagaataacgtgtctgagattcgttatattcccaaacgagcgagaaatacccttataaggcgtatcaggttcgttagattttgcccgggtcacagaaaggcttaatcgctggactgaacaacctacgcacaccaataatctagcccctcatgcgccgatcattgatacaaatctcattaaacctcacgccacagtccaagctccaaatccacgcagaacttaatccacgtatcccgcgtgacccttgtccatcaagtagtccatctcagcatccaggatgctttccacggtcaactcatccagcttcacatctttacgactaagaatgtagtcagccagatcatcgccgtcaatatcaacatcattgcctttggaattctcatgcgccttgttgatgtacgcttgctcatgcttcagcacaagggcgatattcgcctggcttgccttcgttttatctgcaatatattgcatcatttcttgttcattaattgcgtttgcttctgccacgttcagtcatctccttgattcatacatactgttgccattgtagcataggttaacccattacaggcagaacttatgcctgaagaacgattatatagcggtagcgaaggttagtgtggagccggctcatcactctgcccctacgacaaccgcacgtaaaatgtagcaccctctccaactacacttcgagcatacacctctcctttgtgctgatccacaatggaacgagcaatcgccagccccagaccatgcccaccatgtttgcgggctcttgacgaatcggtacgatagaatcgatcgaagatccgatccagatgttcgggtgcaataccttcacctgtattggacacggccagcatgacatcattattctgtttctggagggtaacgtttacggcgccttttggaccggaatacttcaccgcattatcgagcaggatcagaatgacctgtttgatctgctcactgttcccatgaactgtaagattcggctcaatgttataatcgagggaaatgtttttctcaaaaataacggcctccatcggcaaaataatactctctaccgcatcactcatattaaacttcgcatgaatcatcgtggagcgtgagtcatccatctgtgtcagatagagcagatcattcgtaagtccggtcatgcgctcggtttccgacttgatatagtgcagccacttcgcctggttcgctatggtatcctcctgattcgcaagcagtacgtcagcattggtattaatgatcgccagaggtgtcttcagctcatgtgaagcatcaccgatgaattgtttttgcttctcaaaggcttctctgactggtgcaatggagcgattcgcaaaataacgactcaggaagtagatcacaatcaacatgaccagtccaacaatagcaaaggtatagatcagattcgtcagaatgccttgttgtgccgtcacatcaataaatacgatcatatgcccgtcaccgctcggatcaaccacataggcccagtccgttccatccagcgtaaattgccccgtctgccgttccgaatcaccaactttattctggtcaaccttttgtaacgcctcggtgtagaacgtatcttccatatcaaatcgggaatgtgtatccgtaatcttccacttatcatccgtcttaatcatgaacgaaacggaacgtgccggaggtgagttgggatcacctcccggtcctccattatcaccacccatggtatcggaaggaaacgaatctgaaccagaacttgaaccagagcctgtacgaccccctgtaccggaaccctgcccttccccgcgcggcatcttggatgaattataaggactgtgatagaaatcagacaccttgtacaactccatattggtctcacgctgcacattctgataggtaattgtatagatcgtcgcaaatgccaccagcatcataatggagatggaaaccagattcacgatcaggaagcgatttcgaagtttcttgaacatcaggacgtcacctcaagtacataccccacaccccgaatcgtgttaatgcgaacggcagagttcaggaaggttaactttttgcgtaaaaaagagatatatacttccacattgttatactccacttccgaatcaaatccccataacttctcaataatctgctctttggaggtaatcgcctgtttgcgggcaatcaacagctccagcagttcattctccttcaaattcagcttgatctccttaccctgaacgctcagcttcagttgagttgtattcagctcaatgtcgccaaacttcagcccatcctcgggaatcacttcgcccttccgtcgtaaggctgcacgaatccgggccagtaattcctctgtggcaaaaggcttggcgatataatcatcggcaccataatcgaggcctgtgactttgtccgatagttcacctttcgcagtaagcagaatgacaggcgtatgattgccttcactgcgaagtttcttcaggacggtgatcccgtccatctccggcatcatgatgtcgagtagtaacaggtcgtagatgccgctctgcgcataatccaatcctgatctgccgtcgtggaccatatccacggagtaattgttttttttcaaaatctgcgatacagcctctgccaaatgaacctcatcttccgcaattaatattctcatcatctattcattcctctgcttgaattatttctctcaatggacttgttttatatgttcttattctatcaatcaaaccttgaatcaatcttaattcattttgtgtatgcgcactattataggaaggtaaaaaaatgttaacgcaatgtaaaaccatttaagattcattcaaggttggggctctaagatacagacatggaagcaatacacgatgcaacaaaacatacaacccaccaacgaaaggaatgagtcccacatggctattgaagtattcaaccgatatgagagcaagtaccttctgacggatgagcagtacgcgcatttctacaatgacctgctgaaatacatggagctggatgcctacaacaagaaacatgagtactactccatcagcaacctgtacttcgacactccacaagattcactgattcgagccagtctctccaaaccaaaatacaaggagaagctgagactgcgagcttatggaatccctgaagagaatgccagagtgtatctggagatcaaaaagaaagtctttggcctggtgaacaaacgcagaacagccttgaagctggatgaagcatatgaattcgtccgttcgggacaggcgccagagctcgcggattacatgaacaaacaagttgtcgaagagatcaaatatttccttcgggtatacgatctggaaccgaaagtgtatctggcgtatgaacgcaaagcgcttttcgacaagaacagccgcgatcttcgcattacctttgacaccaacatccgcagccgcagatacgatctgaagctggaacagggagattacggtgaaccgctggtgaaggacggtcgatggctgatggaagtgaaagccgagaaaaccgttccgatgtggctgtcacaactgctgtccgaacatgggctgtatcgtaccggattctccaaatacggcaacgagttcagacatctcgcgagaacaaccaacctgaattaccagacggagcgcattcttgtaccaggtaccgatttcaacccatccatagaacaagataaaacgattatagaaagagagcgtgtcctatatgcttgattcactgttcagttcagccctaaccgataccaacctgacgtttaacaacgcagtcataaccattggtcttgccattattctgggattaatcatcagcctcacgtacatgaagactaaccaaagcacatactcccagagcttcaccttaacgatggttgttctgcccgttattgtcgccattatcatcctgctcatcggcagcaacatcgctcgagcattcagcttggcaggtgccttctcgatcatccgattccgaagtgcccctggtgatccaaaagacattgcttacgtattgttcacgatggcttccggtcttgcctgcggtgtaggcgcttttggatacgcggtgctgttcaccattatcctgtgtgtactgatgtttgtcctgagtcgcttcaactttggtggcaagaaaagtcagctgaaaacgctgaaagttaccatccctgagaacttgagttatgaagaagcacttaatgaagtgttccatacattcaacgtaccttttgatctgaaaaaaatcagaaccactgaactcggcagtctgtatgagctggtctacagtgtaaccattcatgaaagtgttagccaaaaggaattcctcgatgcgatccgcacccggaacggcaacctggatatctcattaaccatgagtccaacaacggaatattaatttataattcgaagggaacgatctaatatgaagaaaaacatgataacaggtagcaaactttggtccatcgccatgattaccagcctactcgcagcatgcagttcaccagcaaccacaagcacaacggccaatgccgcaacgtcaacgacaggaacaaccaaaacggtatctgtcagcgagcaaacttcagtgaaatatgcagatctggtctctctggatgctgacgataccaatattagctggagtgaggcagattctacagcgattaagctgaacggaacaactgcaacggtgaccggttcgggcgctaaagccgcgaatggttcggtaaccatctcggaagcaggcacttatgtacttagcggtgagctaacggatggacagatcgtggttaacgttgccgataagggtactgtgcatctcgtattaaacggagcaaccattcatgataacgacagtgccgcgatctacattcagaaggctggtaaagcggtgattacactcgaaaaaggaaccaagaataccgtttccgatggtaaaacgtatgtgtacgccgacgctacgacagatgagcctgatgctgcaatcttcagcaaagccgatcttacattcaacggtgcaggtcaattgaccgtcacaggtaactataatgaaggtattacgagcaaagatgatctgaaaatcattagtggtagcatcagcgtcaaagcagccgatgacggcatcaaaggtaaggatatggtcgccatccaagcgggtacgattaccattgaaggcgaaggcgacggcattaaatcaaccaatgacacggataccaccaaaggcttcgttgccatcgcaggaggtaccttcgatatccaaagtggcaacgacggtattcaagctgaaaccgcacttgttgcggatggcggcacatacaacattgtaacgggcggcggtagcaccaatgcaccagccaaagtagaagaaggtccatttggcggcggtggatggggtggcggcacacctccaacggatatgggcacaccaccggatggcgaacctcctgcagatatgccggagatgcctactaacagcggtacgaataccggaactaacacaaacggcgtagcagcatccagctctgctaacacaacaacaacggataacaatgccgatgctgacacagctacaacagcaacggagtccacaagtgccaaagcactcaaagcaggtacagatcttacggttaatggaggttcgtataccattgattccatggatgattccctgcacagcaacaataacgtgacagtcaacgacggaacattcaacattgaatctggtgatgacggcattcatgccgatcaggcccttacgatcaacggtggaaccatcacgattgcgaagagctatgaaggacttgaaggtgcaatcatcaccctgaacgatggggatgtagatgtaacggcatccgatgatggcgtaaatgctgcaggtggcgagacggaaacagctgcgaatacagcggcaagtacagatagcgcgactacagcaaccgatgcaacaacgacatcgaacatctctgtaaccgaaacgacaggcacaacatcgactaccgatcaggcatcccaaggtacagctgctaatcagcaaggacgtggaccgggcggtatgggtggtgcagcagcaagcaataacgagttccacattaacggcggttccctcaccgtgaacgcaggtggtgacgggctggattccaatggttccattaatatgactggcggaacggttattgtgaacggaccgacgaatagcggcaacggagcattggattatgacggcacatttgaaattagtggtggatacttggtagctgctggaagctcgggtatggcacaaggaacatccgatgcatctacgcaaaataccattgtgatgacattccctgcaacgcaaaaagctggaacacttgtacatgtacaagatagcgaaggcaacaacattctgacattctctccggcaaaagattatcaaaccgtggttgtcagctccccggatcttgcgaaagatggttcctatgttatctactccggtggtacgtctacaggtaaagcggtggatggactctacacagacggtacctatagtggcggaacccaagtagttgccttccaatcgaccagtaatgtgacttgggtgaatgaatctggtgtaaccactgccaatacaggtatgggcggtccaggaggaggccgtggtcaaggcggcttcggaggcggtagaaatcggacgcaatccggtacaacatccgacagcacagttactactgattctgcaaagtaatacgtgcggtaagcaataatcaagcaatctcttgccccaactcaaaggcgagacaaaaaggccccgaatcacttcatagtgagttcggggcctttttcgcatccgcgttcttacgcggtatctgcattactatgatatggagcacactctttcatccattaacgttatggcagaaggcttacagcactccagctgagcaaaaacctggtgatcactttcctgttcttttctttaaaaggaatacacatacaccttggtgcgcaaggtatcccggcatgtaatggtgcgtagcggttcttttcctggcagggcaaaacagacgctaattaccttggcacccggcggaagctcccgactgaacttgtccagaagcttagtcatggctcccgggaacagataacagatcacacaatccgcatgttcataggaactggtgtagatatccccgcgcatgaagcgcagcctgcccttgagagagtgcttgtttcccttggctcgacgtaagcgaacactgaaataggcaatcagttgggaagaccataagggaatgatagaattctcaatcccggtcagccttttgccagggcagtgccttacaacatccagtcccaatgtgccccatccggagccggcttcgagcacatccccgtaccctggaatacggtttacctcctgaatgaccacttgtctgacacgactggatgtgggcatcggcgaaatcccgtttttccaactgacaagtacgatggatatgacacatatcaatgtcaccacggcaatcagccatggaatcaggtaaatgatgaacatgaactcatccctttgttatcactcattcattccggcacatgagacttcatatatacaccctttttataaacggacttgatggtaaaatgtacacccagcttgcgattcgtccgatagattagcgagttaatctcgtcgatccctaccgcttcactctccagcatgctccgctccggccacacctgagccacaatttgttcccttgtcacaaagtggtccagttgactatacagcagcttgaacagctgatactccttcttggacagcggaatctccacttcaccgatctgtacggtttgcaggtgatcctgtaaacgtacgccctcacccagcagatccgacacccgatattccctcgtctctccaagatcgccttccgtgcgaagctggatcaggccgttgaccaacgtcaggctatcgccctcgctaaacggatatttctcatagggaacgaggcgctgcccgttcagttcggttccatttttgctatccagatcctcgatccatagctgttgctgtacatcataatgaatgcggcaatgccgcttcgatatcatctgattataaacagacaagtccaattcactaccgcctgtgtaacgtcccaccgtaatggagcgaccttggcttacataagcgaatgagccgtcactttcctgttctggcgtacgaatgacgatttttgccgtctcccgcatgttattctcccaccttcaatgatcactcgatctctataaacatttcataacaataatgataaaatcatcagatttgttccattgtttgcagcgctatagttcaatatagtggtatacaggaacgatttatgttcggttctactcactctactataccagacgttgtgctttttttctcatgacggccggatgtctactttagctcattcaacaagagaggtaccttcctatgaacaaaaaaaacattttcatatacgtattgctcgcctttgccctgtccatgacattaaccgtgctctcccgtatgaacgatgatggcggagaatcactgaaaggcacatcagctgccgaaacctcatggttacaaatgaagatccagccctaagtctactctattataacgtgatctccgcgcaaaacgtttcacgaatgtcatattaggctaagccatagactcacatcaataaggccccagattgctggtaacagcagcccggagcctcattttaatccaaaaaatctatactacacaaaagatcatctatccgttgatcaacagagataacgacttatttcccaaagcgaagtgaagtggacagcggacattcccaccatcttacccacattcatgtcattgccgcttctttctcgcgccgaatttcctccagccatacacgacaagagctacagggccagcgaaccataacaactgccaaagcataattttcaggtcgaatcccatttcaagaatccctcctccgataatcgcaaaggtaaatacaatcgttcaaaacccaaatcaatcttggtcttcctccggtacagtcggctcgtcgtcaggcttcgctgtcactctggactgtacttcctccatccggctggacaccttctgatacaggtaagagatcccaagcaatagaacgccgaagctgaaataggcaaagattttgctgcctgaggtaagcatccccacatcatagaacaccatcttccccgtagcgaacaacgttaggccaaggccgagacgccgaatcatgacatattttctacggaatccataggcaatatagagaatcgcgagcagcagatagatcaggctgaacatcagccccacatcaccccactggaactgaatcgtcaggaatacggtgatgacaccgagcagatacacccctgcgataaccgggtaccattcaatgctcttgaactgcccgcggatgcctgcaatcagcagatcccttcctgcaaagaatacccctacgttaaagataatcaataccagcaaaccaacaatctccgccgccgtatgctgcggaacctccggctgaagcgctggcatggttaaggttacggccagtgcaatacagcagccaatagcatgcaagaaggtggtatacacctgcacgtattgatcacgcagcagcttcaccttgttcagtccataggccaacgcaatggtgagcgctgcgaacatgagtaacttgtagaacatgtataacaggaacgtcccatcgacagctctggtatacaattcattcgactcatacagcacatataaccacagattcgcaagtgtcacatacttgaatccgttcagaaaacccagctccagcgggctgtaattaaatctctctctggaagatgagttgctgtgaactgcccaggcataatacagtgtaataagcacagttcccagcgtgatgctggtgtattttaacataaagtaagaacgttccccgatgaagaatagcgccagcagatcgtagtacacaaaagtgattagacatagaagaacaatgccccatccggcacgttccaccgacttgagccgtttcagatgtccaagcgtaaccaacaaaactccttcgatcaaccagcccatcgataaccacttggccccgaattggaacggaataatcagaatggcaaaggtcagggaagtgacatagaagagtaatatcgtctgtttctcctgagccatatggcgctggacgaatcgtgcgaggcccagatacaccacgcagaagatcaacgccagcaagccctgagcatcattccaacccgccacatcaaataatacgtataacatcagacaactaatgctcgtattcatggcgagtagagcgaaatcccaccaggttaacttcatccggtgtttgaatggatatgccagcgtaatgcccagatataatgcaaacgtcacaatggaatacaacatgccaattttctcacttggcgacagccataagaggatgagcatggatggtgtgttaaacaggaaactgatatagtgcaccaccggccaccgtttgccaaacgaaatgaacacaataatcccgtttaagagcagcagatagatcatggctacatagacagcagggccctcaagtccgaacgagaacatgtaggagaatagcggaagatatccgcctaccaaacccagtgaacagatggtcttagactggtatctcaaggacaacaaaacggagattgccgataccaatacagaaagggcaagtcccgtatataacccgataatatgcagtaaaaagtaactatagaagacggagccaaacaacacggatatccccccgccgagcagccccatcgcaaacgtctgccttttgcggcggaacagccactctcctccggcgagcatcagtgcaccgagcaggaaaaaggccccgctcttcatctcgtcattaaaccaagtggagtacgaatattggaatgctgctccaacgcccagaatgaggagcaagatggctactttgttgatccagctgagtccaatcttcatctccatgcgattctgcttgatccggcgttgaatagtctcttcgctcaacccttcctccgccatatgctcatatccacgttccatgtgcccgcgcagagcctcttctctctcccgtacggctcgtctgtgcgattcaatacgctcattcacctctgccgcaaggtaagcaatcctctccttcacttcatcggaatcctcttgcaactcctgtgcggcctggttgtacagcgcgtttagattggatttggttcgatgctcatggaatgcaattcgatcattatgtactgctgttttcccttgaaaataggtctccatcttctctcgcgatacccggatcagattcagcttctcatccagcatctgttcggataacgccatgcgaagacgtgcattctcttcttccatcttgcgtgagcgaagttcgagctgttgcagcttgagcttgtgagcttcatactgttcctgtaactgttcattctgaacgatcaggtcatcggactggtattcctggagcaaggcgtgatactcctttgccagctgtttctgctgctcctgaacctgttgaagccgatccttaaactctttcatgagcttcctccgttggttgatgtttaatcttttccctatattttactatatgtatgccataaaaagaggtttaaacattagatatatctgtgcaatatttcatccgcaggatctcaaacgcaaaaaagccgggaagcaaccgcttctcccgacttatattcatatgagcatttgcacaagaatggatgcttatgccgcatcactcgtctccgattggtccgctgactcgggctcaattatctctgtcgcatccgggtccagccaactggcgatcatgccacgcacatattgcagatcgtcctcagacagatcgtagtaccatgtgccactgcgcgttgcaccctcacccttcagcatgtaattgctgatcgttggtatgctatctttcatatataaggactcggcaaatttcacgataaagtccgaggtcatgttggttgtaaaattcgatccggcaatctggattacgtccgggatcttggtcagatttttcacttccagcgcacgattcatgaaggcacttaaaaaaatccggtgacgcatcgtccgattgaaatcggagtcctcccggtaacgcacataaccaagcgcttcttcgccgctatagatcggtttattggcttcaacaaacagcttctcatgaattttgagtttgttctcaatattctttttgataggcagttcaacgccacccaccgcatcaacaatatccttgagcccgttaaaattaatcgcggcatagaaatccactttgttccccagcaaattctccaccgtatccatcgccatcttggcttcaccgtgggcatatgctgagttgatcttcgacttcacatcccggccgacaatctcggtataggaatcacgtggaatggaaagcagcagcactttattgtcttctggacgcacaacggaatagatgatggtatccgaacggcttggttcgttatcccgttggtcaatccctagcagtaacaatgagaacgggtccgtatgttccacgacaggggcatccttatcgccagctggtacaaaggagtcatccaaggcatccttcactgtagctgaagcgaacaaattaaaggcaaacacgacgagttgcttttgatagataaatccgagtcctcccaacacaagcagcacacttagggtgatgatcaatggcttcttccatttcttcttcggtttcttcggcttccgtcttgttaaatgtgcggcactgttttccatcatatctcctttaataacgggttcttagaatcatttaactatattaataacacgttttcaatagattacgttataatctgcattacataaatgtacataaagggagcgatgaatgatggagtatcgacgtttgggcaatagtggtttgcgtgtgtcggcactggggctcggcaccaatgcgtttggcaaacgcgcggatgaagcagcttctacccgcattattcatgcagcgatggatcagggcatcaactttatcgataccgccaacatctacgcaggcacggaatcggaacgtatcattggacaagccctctcagatcgacgggaaaacgcggtgcttgctaccaaggccggattaccccggcatgatggtcctcatgggcggggttcctcccgctaccatctgcaacaagagctggaacatagcctgcggcgtctgcaaacggattatgtggatctttaccagatccatacttttgatccgcatacaccgctggatgagacactgcgcacactggacgatatggttacttcgggcaaagtccgttacatcggagcctccaactacgcagcctgggagctgatgaaagctctgggcatcagtgaacagaaagattatgtgcgctacatctccacccaaaccagctactctctggcagaccgtacacccgagcttgaactggtaccgatgtgtctcgatcagggtgtaggcattatcccgtatttcccgctggcaggtggtattctgaccggtaaatataacggacagacccgtgtgccttctggttccagagcagacaccgatccgtccttcaaccgtttcctgctggagcataatatccaactgagtgaacaagtgagtgctaaagctgcctcatatggttgctccccgagtgtgctgtcactcgcatggctactgacacgtccagctgtatccacagtgattgtgggcgctacacgcaccgaacagctggaacataatctggctagtctggacatgtcactgcccgatgagctgttggccgatctggaccagatcagcgactctttccgtcgccgcgagccgtttgcatcctaccgaatcgattgagtaacccaaatagacctcccgacaagatgaagtcaggaggtctatttgtattttacagaggcgctataattattaataatcagaaaattttccagttccactacattctgtagtttaatacactaaaaaaagatatattacggatcaactctctgttttttggcgaagaaactcctgcatgatctccaaatactctcccttacgttcatccaaagtttcgaaaaatgccttgtccgattcctcgaccagatggattccctccacagccaatcgggttccttcttccgttgttgtgataatattggcacgcgtatctgtctgatgacgagcgcgggtaattaatccccttttttcaagcgcacgtagaacctgagaagtcacgttaacatccaccttggcaaactgagcaatttgaacctgagtcactcccttgccttcctcatcgtgttcattgagccataaacaggcgtgcaataatacaaattgaggttgtgtcagttcgaggggctccagcaccctgcgtacttccttttgccacatggctgtaacctgccataacagatatcccggactttcttgtgcgtttttataccgtgagcttgtcatctcatacctccatgatgtgcgaccttatgcaacagaatatatacccgtcagtcaatgaagtaaatccattattcatataacgatgatggaaacatatccgttgcaactctgtgtgttctttctcaaaaaaataattagcgcgcagggataaactgcttcacccattgtccgaatccttgcggattgcggctctgtataagaatagttccttctccccggaaccgacataccagtccttctccacttgtaacactggataaccagccctgtgaagctttctcaatacggtaatctacataatgaggccatgccaccaaatgggcgttatccacgatcatttcctcacctgctgccagattaatcgcatggatggcaccataggaagacagaaatacagtcccacgtccgctgatctcaataatgaagaaaccttctcccgaaaagagaccttttttcaggttttgcattttggtattcacctgaatgccctcggttcctgccagaaatccgtctttctgcacataaagtgaataggaaccgtccaattcaacagcttctacatcgcccatgcttgaaggtgagagcagaatctctgccgatccgcccgcagccgtcagttcctgaaagaaaaacttctccccgctcaacatccgaccgaacccggcaaacatcccaccttctgctgaacccttcagttcaaccgtaggagtcatagataccatcgcaccactctcggccttgaaccgctctccccgctgcaaatgtaccttgagcatcgcaaaagcaccatcatataaaatctcatagttcacggttgcaccagctccctattgtcagagttaaaatcattgagtccattatcttccagaactgctgatttgtctccgtattccttcacaatatgttgatctccccaattgcagagcgcattgagaatcggttcaagacttctcccgtaatcactcaattcgtattctactttgggagggacctgattatatacgatacggtttacgattccgtcgttttcaagctctctgagttgctgtgttaacattttctgtgtaattgcgggcataatacgcttgaggtcactggttcgtcttttcccatgtgtcagatgacagagaatgacgcatttccacttgccaccgatcacctctagggtagcttcaaccgagatgttatatttttttccaaccataacttgcttcctccctgatgaattgaattacatccgtcgcatgctgtataggcaccaaaaagtacgtagggtactaaaaagtacgtactattcaatctataccgaataactcataatagcatttgccggtacgtaaatctacattcgggggagtggagcaagaaatgttacaagattcaaaacgcagcacgtgggcactgctagcactggccattagtgcattcgcaatcggtaccacagaatttatcagcgttgggctactgcccctcattgcagatgacctgggcatttccgtaactacagcgggactgaccgttactttatatgcattaggcgttacctttggggctcctgttctgacctcactgacgtctaccatatcacgcaaaacgctactgcttgccatcatgattgtcttcattgcgggtaacacgatggctgcactatccacgggcatcaccatgttactcattgcccgagtagtatccgctctggcacacggggtgttcatgtccattggctccacgattgcagccgatctggtgcctgccaaccgtagggcgagtgctattgccatcatgttctctggtcttaccattgccacagtaaccggtgtacctctcggtacactcatcggccaacattggggctggcgcgctgcctttatcctgattgttggggttggcatcgttgcaatgatcgggaacctgatactcgtgccatccacgttgaagcgaggaacacggacggcatttcgggatcagctgaagctcgttacaggtggacgcttgctgattgcttttgccatcacggctgttgggtacggaggaacatttgttgtctttacgtatctgtccccgttgttgcatgatattagcggttattccgagaaaacagtagcgttcattctgttgttgtacggaatcgccattgctattggcaacatcatcggcggcagagcagccaatcgcaacccgctcaaggcgctcttctacatgttcatcattcagaccatcattctcggcgtgatgtacttcaccgtcccgtttaagttggcagcactgctcaccattatgggtatgggcctgctcgctttcatgaatgtgcctggtcttcagatgtacgtggtaaccttggctgaacgttatgcaccacaggccaaggatgtagcctcagcctttaacatcgccgcatttaatgcagggatcgctataggtgcctatttgggtggagtgatcaatgattccatcggtttgattcacacgacatgggtcggtgccttgatggttctcgtagctgtaatcctgaccgcttgggctaaaatgctggaaagcaaggatcaacatgcatccgtcgaaatggagaaagcttcgtgctaatttccgttccgaccataggtctcactcttatatatatatcagttccagccttcgaggggaaccggtttcacatggtattttattatactataatacgttgaacccaatttgatctactatgatttaattttgtatgataaaacaacaaaaattcagcttaatatgactgatttttacacaatttaaggaggcaatctcatgacaacagctcaaaccgcacaacatttacaatccacagtaactctgcataacggtgtttctatgccttggttcggacttggtgtatttaaggtagaagaaggatctgaactgattgaagccgtgaaaaatgcgattaaacatggataccccagcattgatactgctgcaatatacggcaatgaagccggtgttggtcaagcgattgcagaagctttgcaagaaaacaacctcaaacgcgaagaactgtttgttacatctaaagtatggaatgcagacctcggatatgaagagacacttgcggcttttgatacaaccttgaacaaactgggactggaatacctggacctgtatctgattcactggcctaaggcaggcaaatacaaagcagcctggaaagcaatcgaggaactgtacgcagccggccgcattaaagctattggggtaagcaacttccaaattcatcatctcgaagacctgatgcaggatgccaaagtgaaaccgatggtcaaccaggtggaataccaccctcgcctgactcaggttgagcttaaggcgttctgtgagaagcatggtatccagcttgaagcttggtcgcctctaatgcaaggtcagctgttggacaacccagcgctcacggcgattgcttcagacaaaggtaaatcggttgcacaagtcatcctgcgttgggatctgcaaaatggagtcattactattccgaagtccaccaaggaaaaccggattattgaaaactcctccatcttcgactttgaactttcaaatgaagagatggatcagatcagtgctctgaacgaagatgtacgcgttggacctgatccggacaacttcgatttctaatgaataacctttttggagcctgcttggtttgacataacataacgaaaaaacaccggaccagtatccggtgtttttcgttatattctcttccctatagccaagcctcgctaaaactgcacgtttcaattcaaaatgttgtaacccattttttaactattgaacctgccacaatgcagggacattggatggttcccacccagacaaggatgtgtgggattgcaaacatttatacgtcttaccgctataggtgaccagctgtcctacagtataggctgtattcgcctgccaggcggaaacgcccggatttgtcgttcctgctgttgttttcacggtcaccgcattgctcgcagcagaaccattccccgccgcatcctttgcttttaccgtaaatgtatacgaggtatccgctgcaagcccactgatcgttgctgttgtttcggtcacggatgtcgccagagccgttccgttgtacacatcataacccgttacacccacgttatccgtggatgccgcccagctcagcgttatactggatgttgtttgcgcggttgatgcgaggttcgttggcgcagttggcgcctgcgtatctccacccggctgagctgtcgtgcttacagttacagcattactggctgcagacagattacctgccgcatcctttgcttttaccgtaaagctataggatgtacccgctgacagtccgctgattgttgcggtcgtcccgttgacggaggtcacaagattggcaccattgtagacgttataaccggtaacacccacattatctgttgaagcattccaagctagcgtaaccgagttggccgtcacgcctgtcgaacgggcattaccgggtacgcttggcgccgtcgtatctgctggaggcactgtacctccggtaggcagatcggctttcagtttattttgaagtgttttgttccggtcaccgctaagttcccagaacatcgctccgccgagtcctttgcttttgatataagcggttttatatccaatagactccgcatcgtcatagctaataaatcgcttgttggtcgcattatagagatatggcaccttggctgtgtcattccagtaacgcgtgtacccgtttttgttaatgtagttggtctccagatcatacaaatcaaaggagcctgcttcccatgttccaacggaagaacctcccgcacaggtctgatactgaccattgcccgcctgtgcgcatccatcccagccgcggccatagaacggaacaccaagcacaagtttagcggctggtacgcctgcattcaaatgcccttgtgctccggcagccacattaaatgtattggcatccggcaccccagcagccgaagccgcagggtcatagttcaacggcgcgttatgcgcgctgactttttgccaagccccgttaaaatcgtatgtcataatattaatccagtcgacgatggcagctatattggcaagctcagtattcgcagcataggtcgtcgatgcaccgcttgcaatcgtaagcagatacttcttgccgtccacagctccggcagcatccagcttctcacggattttgctcagaagcagtgtgtaattttgcttatcctcaggacgtttgctgttaccatcaagtccgcctgataccgggtactcccagtccagatctaccccgtcaaaattgtatttccgcaggaagtcgacggcagagtttgcaaatacctctctcgttgcagcagtcgcagctacatcggagaagcggttggaccatgtccatcctcccacggagatgattgtcttcagattagaattgatctgtttcagcttgttaagctgattgatattgcctgcaatgggctgatcccacgtatcccctgcaaatgtcttgccagtatcaatccatggatcgccaagcacgatcgtgccattcggtacattgattgtctggctcttctcattctgacacgtccaggtcaccgggttagggcccgaagggtccggatttccatgaacaccattccagcaaatatcggcaaacgcatagttgatatgcgtgactttggttgggtcgatgtccgttacattatagtttctcccatacgcagcccaggacgggtagtaaccaacaattttataagaatctgcagctgctgccgtagcgggttggagcacaaaagaaggaataatgacggataagagcagggatagacccaggagaaactttgcggttttcttgaaagcagtgtgtttatttaaatgtatcatctaatacacaacctcctttgtcgtttgcgtgctaaaaccattcaggaatgaacgatgtgcgctcgaaaactggttattcgtatatgcatcccagttgattgaccaggtcataatcccttttatccccgcataacccgcaggctggagcaaggtataggaaccgccgtatgacacacctttgatcaaataattcagtgccttctgcagctcggctggcgttgtataaccacctccggcagcctgctgggaagccggcacaccgatggcaatctgatccggtcgcaaggggctaaagaaagggcctgtgctgccacctacatgaaagccttgaagcagcatctccgccatggccacatggaaatcagctgttccttgggcgtaagagcgtccatccagccctaccatggagcccgtgttatagtgctgtacatgaagcagggtcaggtcattacgcaaggcatggatgactggcaagtatgctccccaaggaccgccgtagctcagatatccaccctgtacataggccgtctccggcgcagccgtcaggatgaaattggcgccgaagtgtgacttaaccgctttcacgccttggatgaggttaacaattttcggtgtagttggactacggaaatcggtatcccctgcattcagagacagggagcttccttccagatcgatatctagaccattgaaaccatacgtggaaatgattgattttaacgaatcttcgaactgctgtctcttggtcgcatcagtgagctcaatggtaccgttggctccccccatggaaagaagtacttttttcccttggctttgcagataggcaatatcggatttgaattcagctaccgttgcattgtatggagtaaaagcaagcgttccgctgccatgtgaaatcggttcagcaaaggagacattaatgacgtcataggctgttgatacgttacgaagtctgatattcgttgaaccattatcgaagttatgccagtagccgatcagccatttgccgctggttggccccggattggatgatccattggaagttgtcacactgagggaggtgctcgcagcggatatattacctgcggcatctttggcttttaccgtaaaagcataagtcgtgctggctgtcagtccagtgactacagctgttgtagttgaagtacttgtcacaagaacgccgttccggtacacctcataccccgctacgcccacattatccgtggatgcattccaggaaagactcacagaggtgttcgtgatggaggatgaagtcagacccgcaggaacagaaggtggtgccgtatctggcgtcggcgtttcccctcccgaaccttccccgacgtatttccacaacgcgggcacaacagagggctcccatccggtcaacgccgtgtgggcctgaatacactcataatctttattttgatatgttacgaggtctcctttcttgtatgcggtgcctgcctgccattgggcggcggcatcggctctcggtgcaaaccacgaaataagtagaagaaatgccaaagcaaatgtaatgaccgggcggaatcgaacagcttgattcaagcaaaatccctcctgtactaaggatacgttcaccttgcaaacaaaacttcaattttccacctgcatctgatctgtgatcgattagagccagccccattcagccatctgatgttgcgtgtcacttcactcccttcccttaccaaaatggaccttccctctcgtgttctttttttgcaggcaccatccaaattttacagggaatttacagatcctcaccctgtatttaatcagtaaactgcaaaagagataagggataaaatagttctattgggggcgaaaaatgtaatatagcgcacaaaaaaggttttctttcaactccttaggagacttgaaagaaaacctgtgttagatatttcgcagagaagagggcgtatcttactgccgctactcccctctcctttccaaaggctgccatccatccacgccggacagaatcagaggtacagtgtactcggccgcttcctgttcggtcagtattttggcccaaggcacacgatcagcagcacttccggcaccaggtccggcgctgttatattcagcatactgaacggtctgctctgcatctgtcttgttccagttgtgccatccctcccgcttcacatgagcgccgatccagcagttcagaaaacagactttggcatgatgacgccacggtctgcccagatacaccgactgcggcggagcattgctggtcagatcacagtccagaaacacatagccgtaacgcacatcctccggcgtagaggctgcggtaatccaaccgttcacttgtccatccgtagcctccgcttcagtcaggcgattcttcgtaaagatctcgcagcccttaaacaccaccgtagccgaaccaaaaataaaatcgatatcaccttcgatgtaacagtcctcgaaatactgccgcagtttgcgccgctcggcaccatcgcgtggcccgccaaaataactgcgatccatgggctgctccggcagcgggccggtgaagatcgtatcctggtgaccgatcaaacgacagcggcgaaaggcagcccggtctccatccacataaacggccagggcctgaccaacttgcttgcccggcccggcagcatttacgaaggaaatcccctctgccgtgaaatcatcggcaccaacgaaagccgtataggaatgaaacgtatgatatggcgacccgtccggaaacttcttgagtgcatgatcatcatacgtaatgatcgtctgctccgccccctcaccaatcaggtggatgcccggcttctccatatgcagcttctcatgatagacaccagccttcactcgaattggaacgattccgatgccattctccggcagcgcatcaactgcggcctgaatcgtcacataatcccctgtcccatctgaagcaacagtcagacagggagctgatgattccaatgctgtatttggcaatctctgctgcgtcatggcagtcgctccatttccagtgctgccagcagaagcggagccacacccataaaggaatcgcttacaaccgcttcggttacatagtagttgtacgagccatcccgatccaggcttagtcctgcgccatgacagatcccgtttaaccgaacgccgtcagccgtctcctccaccaatctggaggacagtccctgccatcccttctccgccgcagctctgaaatgcggctccagataccttagtcgcacacccttcgcaagtgcatatacaaacatgcttgacccggatgcttccagatagttgcctttgcggaagccctgatccagcacctggaaccataacccgctctcctgctcctgcacgcgtaccagagcatgacacatccgttcgaagatgccgatgatggttccgcgctttggatgattcacggggaaatgctccacgctgtctacaatcgccatggcataccagcccatcgcccggctccagaagtgtggtgagcaccctgtcgatgaatctgcccagacctgctccttcgattcatcccagccatgatagagcagcccggtccgcggatcacgggcctggcgttcgatcagcagaatctgatgtgccacttcgtcccacagctcaggtagatcaaacgtcttggcatactctgcaaggaaaggcgacgacatatacaatccatccagccacatctggaatggatagatttttttgtgccagaaaccgccctccgacgtgcggggttgccctgcgagctgtgctgccaagagatgagccgcttctacgtaacgctgatcttcagcaccatccagtaatgcaaacaggtttttcccctgattaatctgatccagattatattcttccaaagtataggtgccaatagagccgtccggctggatatacaggtccatatgttttttcataaaatcaacatactcttgtttgccataatactgcccggttcgtgccattgccatcaaggtcatgccttccacgtatgcccatcgtcccgaagggaacgcatgataaccgtccccgtcacattgctggatgatcgttgctgcaattcgctcagaccaggataactgtgtctgtacctgcataagcaattcctccttgaatgttgtactcacctaatacatgtatgactaacggataaccgcttcactcttcaaaggtcgctgtccttattgccggcacattgccgttgaactgcgaaggttcagcttaggctgaatgactaccggaacatcgacctgttcatcacggattaacgatacaatcagctctgctgcctgcacggccagttcatccagaggcgggccaattgtagtcaaggccacttccgcatattgcatatccggcagatcatcatacccaattaacgagatatcgcgtggaacactgtaacctgcctcaagtaaagcccggagtgcccctcgggtgaccaagttgttcagtccaataaatgctgtcggcgaatccgccccaaacgcatgattacgtatggcaaaatacccgtcttcccaagaggaatgcgctggcaacacatggtcttcgttaaaacccagacccgtacgctgcaacgcttccctgtaaccctccagcttgacgtgctgggagttgccgatgaatccgattcggctgtggcccagcgatttcagatgctccactgctttgaacagcccttctttgcgatcaatcttgatgtaaggagagttcggcgcttcatctgtacccagcacaaaacatggcatgttgagtgttgcaaactttttccagaacatctcccgattgtccagtgcatagtcccacagaatacatccgtccacgcgcagctggctgaagacatccacgccatcatccgccacaaccaggatcatctgatatccccgcttcttcagctcggtgtgcagacggccggagatgttggagaataacggattgctcagctcatccagcacaaaaccgatgatgttgcttctgccggtggagagctgccgggccagcatgtttttccgatattgatgtttctctgcgaccgcaagcaccttctgctttgttgccggtttgattcggggatcatcattcagcgcctttgataccgtgctatagctcacccccgccagtttggcaatgtctttaatggttatcaaaatcaatcaacacctctcatacgcctgaagccctatttcttatttctgtgcagatttataacgatcatattgtgcctgtctgcccgcaataacctgctctatattcatctttttcaacgtctcaatataactgtcaaactggtccagactggcgtccccgctaataaacttaaagttcatctcttccacatatgtggtgatgtcaggcatcgccatgctctccacactcgcttcatccggcagggcatagacaaacgggaacggttcgcgcacatacggctccagttctttatccatcttcgcatgccaaggggctacgacggaatcagcagaatcggtggattggatgttcggcagattcaccggaccaatgccaagcttctggatgtattcattgtccttgcctttgtccgtaaatgtcttcacgccattctcttccgtatacgtgtcatccttgatgccccacgtataatacgtctgtgcttcctcacttacggcatagtccaggaaacggaaagcaagttcgggatttttactatcacgtgtaatgccaaagatgccactcactggtgtacgtcctacatagaactgatccccgtgcggtcctttcagtggtaaaatgcctttgatgattggctcttccggattgtaatccttgaacaacggactgtagaccatcgacatataccagctaaaattaaacgttgctcccgtcacatcctgagagatgcgcgacgtgacctgatcactcgtagtactcgcataatccaccccaagcagaccttccttgtacagtccgttcagatagctcaagtactccttgtaggcaggctcataataactgaaatgtaccttgccctgatcgtctgcataaaactggttggacagatcaagtccaaatgccgggccaaaggccatggacacaaattttgcttccatggacagcggaatctcatcggcttttccgttgccgttcgggtcgtctgtcttgaatttgcgcagcatcgccgtgaattcatccagcgtggtcggctcgcttaatcccagcttatcaagccagcgcacattgaccataaataccggcatgtagttgcgggttaacgtctgctgcgggatataatacattttaccatctggcgttgttaaactggctttgaccgaaggcgacttttcatatatttttttgagattcacgccgtacttctctaccagttcattaatcggaatgaatagaccgctgttaatgtacttcatcagttgatcctgatccggcaggtacacgatatcgggcaagccggtaccagcagccagcctcggattgacggcatccgcatagttctgcggcggaatcagatcccaatccaccgtcacaccagcgttgctctcaattttcttcacgatggctgcggtggacaagtccacattggtcgtccaagcgttggtgccgagaatagacagcttggcatccggttgatccgtcaccggccctgctccggtataattgaaggctggctccgaactggacggggtgctccccgcatcggttcccgcccctgttccgccgctacatcccgccaggctgattgccagtatcgctgcgattacactttttcttcctgcccctttaaatctcatccatcattcctccttggtatgaaccattttgaactcccttgaatgacatgacacttaagtaagtaaagctatcctttcacggctccgagggtaattcccttaacgaagtaccgttggataaacgggtagatcgtaacaataggcagaatgctgaccacaatggatacataacgaacctgaagggaggagaccgccaacgcaccggatgtcatcgtaccgcccatcttctgcatcacttccggcgaagccatgatcagcactcttcgcaggaacatctgtaagggctgcatatcctgtttgcccagatataatagggccgtgaaaaagttgttccagtggaataccgcatagtacagcgtgagcacagccagtgttggcttaatgatcggaaccgccagacgataaagcatcgtcatctcgttggccccgtctatactggcactttcgaaaatttcattcggaatgccttcgaaagctgagcggcagatcatgacgttaaacgtaatcaccagcacaggcagcaccataacccagcgagtgttgtacagcccaagcgaggtaatcagcatgtagaccggaatgagtccacccgagaaatacatggtgaaggcgatgaagaaattcagcttgcgacgtaagaaaaactgctgtctggataatggaaacgccgcaagacatgttgccacgatgttcaacagtgtgcctaccacggtgtaccagagggtgttgtagaacgaaacccacaactccttgtattgcagtaccatttggtaacccgacagggtaaacccaacgggccacaatacaactttttgtttgtcgatggcatccaccgagctgaatgaaatactaatgacgtacagaaagggatacaacgtgacaacaaccgccagtatggtcagcaggtagacacatccgtagaacaaacggtcacttctcgatttttgcatacaggtctcctttggtccgggttatagtcttaccagagtgacatcttggtcaggcggcgggtcatggaattggcagcaaaaacaaggataaaggtgatgatggagttgaacaggccgaccgctgtggcgaagccgtaattctggccctcaatccccatccggtatacataggtggacaggacatcagctgtttcgtaggtggctccgttgtagagcagatatactttctcgaaacctacactcataatgccgccaagcgacagaagcagaagaatgacaatggttggtttgatactgggtagggtcaggtgccatagctcctggaatttgttgacgccgtcaattttgccggaatcatacatctcggggtcgatccccataatggctgcaatgtagatgatggagctgaagccaaagctctgccagatgtcggaacttgtgaagatggtacggaaccagctcgcatccatcatgaagttcactttttccatgccaagactcgcgatgagggtgttcacaataccgtctgttggtgacaggaagttaataatcataccggctacaacaacagtggagatgaagtgaggaaggtacgtaacggtctgggcaaatcgcttgaatgtccggttcttgatctccacgatgcagacagcgaataaaatcggaatggaaaagccaaacaggagtggcaggaaggcgagcagaaatgtgttacgcagcagtcgccagaagtaaatggaattcacaaactgttcgaaccagcgcagtcccacccactccccgctgagcatgccctgccccggcaagaaattacgaaatgccaacagcacgccaggcatcggaaggtacatgaagatgaggtaatacagaaagataggcgaaaacatcagtagcaaatatttatcccgtctgatcaagctgaacagcgtggacatgcgttttttcaacgtgaaacactccccttcgctacataattacaacgtttgaattctcgaataaaaaaaactatcattccactgacgtatttgttattcatctcattcacattttgtaacaacctatatcattcttcgtactaatgagataattaattagaaataatcctccttacaccttatttatttcttttcaatacttgccataaccataattacaacgttgtaattttaatctaaatgtatacgcttacataaactttttcccatcttagcaaagtcttcaatgtttggcaacaacaaaaatcagtggcatgctgtaacgtactaaattacagtctcgcatatgcgagactgcccgttaaaatctacacatgattccgatattccatcggtgtcataacatacactcgctgaaaggctctgtaaaactgactgacgctggaaaatcccagttcataactgattgtggttactgaatccgttgtaaggcggagcctcctggaggcttcttctacgcgcaaattcagcagatattgatacggtgttgttcccgtaagagccttgaaagaacgcataaaatgatatcggctctgatgtgcaaccatcgccatcgaatcaatatccattgggcctgtataggcactgtgaatgtaatccagcactcgttggagatgaggatcaatgaatgtaccgggatttacagtcctttttccattttcctgccccgtcaacatacgtcttagatacgtctcgatcgccatttctgtttcctgcacttgcagcatttcgggcacatcatctaacaaaatggaattccagcctcgaaacagactgctgatctcagcaggatcaaatgtctgggtaggtcgaaactcagctcgccccccacttaactccgcaccttcgaaactgcctaatggcggtttacggaacttgatcacaatgacagccgaatccaaccctatctcaaaataatgctcagtctggggatgagcaataatccctatccctgcttttagcgggtatgcatgccgttcctgtaccagatgacattgacctctgaccggcagcgttagctgataccagtcgtcatgtatatgcggctcattcgcaaagcctccggtagctttccataattccaacccatttagcgtcatgtttaattccatcgtttgctcacctgctgacattatagcaaatcgtgctcactttccaagcacttttcacaaagacatgatctgcccccatcttttatcatagaaaaaaataaatcgaggtgatctcccatggctcaggccactttaagcaaaatgcaaatcaactcctccgccaattgggcacttgccggagtcagcttcgcccatctgctgaatgatgcgatgcagacagtggttccgtctgctttcccgttattccagcagaccatgcagctaagtttcgcccagatgggctggattgccttcaccctgaatattaccgcatccgtccttcagccactggtcggttatatgtcagaccgcaagccaatgccgatcctgcttcccggaggcatgttattctccctgatcggtgttctcggcttagccttgtcttccgagttatggatgttgcttgtttcggcagcattgattggtataggctcatccatcctccatcccgaatcctcacgtgtggcccatatggcagccggacgaggacgcggaatggcgcagtcgatcttccaggtgggaggcaacacaggacaggctattgctccattactggtcgccttcatcctgctgccacatgggcagcgtagttttctatggctgatgggctttgccctgatcggcatcttcattcagtcttttgtcagtcgttggtacagagacaagcttgccgagactcacattcgtcagcaacgccttctaaaatcaagtggcgcagggccagcagctcggcctgtgagcaggggattcatcgcttttacaatgggaattctcatcctgctgctgttctccaaattcgtttatattgcaggcatgaccgggtattacgccttctattacgcggatgcatatggcttgcctctctcccaggcacagatttgtctttttgttctgcaatttgcaggtatggtcgggaccttgctcggcggcccactcgctgaccgctacggacgcaaaccgatgatctggttctccattgcaggcactgcaccgttttccctgatgctaccttatgcgggccccgtcttgtccatggtattatgcgggatgattggactcatcctgatgtccggcttcagcgtcatcattgtttatgcacaggaattgcttcctcgtcatattggaacggtatccggattgttttttggcctgtcgtttggaatggctgggcttggctcagttgtgttaggttccttaattgacgtgaccagcatttcgtttgttatcaagttatgttcgtttttgccactgcttggtgtgtgtgctgtatttctgcgcaaggaccaaccaagaacagcgtgataaccgttgaaacctctttcgttttgtgactacaatacatctaggacactcgaggataacagaagggaggaataacgcatgattattgatgtacagcatgtcacttggaaaaggggaccccttaccctgctgaacgatgtgagctggcaggtgaatgacggtgaacactgggcgttgcttggcctgaatggctcaggcaaaacaacactcctgaacatgatcaccggatatctctggccgaccgaaggcaagatatccgtgttaggccatgaatatggtgatgtggatctgagacagcttcgcaaatccattggctgggtcagttcatctctgcaagagaaattgcatggcacagaccgcacgcagtatgtcgtgatcagcggcaaacacgccaccattggcctgtatgacaagctgtcagatgatgatctggatcaggcacaggaattgatgcaaacgctgggttgtcagcacctgtgggatcgcgaatatcgtacctgctctgaaggcgagaaacagaaacttctcattgcccgagcactgatggccaatccgcgcgtactcattctggacgagccttgcaatggactggatctgttctcaagagagcgactgctggatagcatccgtgaattatcacagcgtccagataccccgtcactcatctatgtcacccatcataccgaggaaatattgcctgtctttagtcacagcctccttcttcgccggggtgaaatagtccatagcggattaactaacaatctgatgaacaccgaagtgctgagtaacttcttcgaggcacctgtggaagttgatcggcacggagaacgtgtctatgtcagagcagcggcggattcataattgcggggttatacacagcaaacgtaacataggtgaagaaacttaacagtaaaagcccaatatcttatccacatgtggatagatttcgggcttttcactcctatatctagtgttatccaccgttttctgtgtagaactttctaatttatgagtataactttacggtttcatctattttccgcacacctagaaacagaaatagtggaatgcgttgcctgcgcagataggtctcctcgtttacaaaataagcacgttgtggtgctgactcgcgcaaatgttctacacggaaccctgcccgctgcaatgccataaaatacgattcaatggaacgatgcatctttttcacagaaccgcccatccactgctgctcccgatatccttctacaaaatactgatcaaccacccaatccgttcgagtcccggagggttgcagtgtggacgtgatcacaggatgttctacagagaatacaaatgtcccgttctctttcaaagtattgtatatgttgcggaacaggctctccacatcttcaatatagtgaacagccagtcttgatataaccagatcgtacgctccggccgggtaggtccagtcttccatgaacgcttgctcaatccgggcatttaatccttttaccgattcgttagctgcctgaatcatattcacagaaccttcaattcccgtatacgtcgcaccttcgcgctcccgactcagcaattctgcggcgaaccttgcatctccacaaccaaggtccagtatgttcttgccggcaacatctccaatcaactccagcatcaccggcttctccaatgtatcattgacattctcctgccacttgcgacgttccatatacttctcaaagttcgcctcatcatcgtaaaagtccgatcctctgtccttcattccgtgaccctccatttcggataagcatacttcctatttacagcctgtaagagtatacagaatatggatgtgtctggctataacaaaaaggctgttgtctggagttatccagcaaacagcctttctgccttacacttctacaattttagtcgcttagccaaaacgttctgttttgtaccatttgctttcgcgtttccgaatcttgtccataatcaaggagtagaaaaccttgatcgagatcaggatgaacagctgtgcatacgtgaaataggatacgcaggcatagatgaaattacgggtattgctctgtccaatatctgcggcaagtgccaaattgatctgtaacacgtaaataaagtacatgagtgcccaaccaatgaccaggaacacatatgcatcgccggcaaactggaacggtgaacttacctctggtttaaatatggcaatgacctgatagaccagattcacgagaaatataatatccgatacaatgatcgcaagcataaaccagaaataactgacggcataatagatgactagcaacttattacgccaactggaacggttaaacaggttatggatattatccagtaccacttggtagttccccttggcccagcgttcgcgctgcttcatgtacacactaagctgttccggctcctgctgataagcttccgcttgcggcgcaagtgccacaaactgtccgcgattcaaaatctcaaatgataacgccgtatcttctgtaatagctgtcacatcccagccgccaatctcccggatcaactcggttttgataatgtaattcgtccccgggatggaaccaagctggaacaattcccacagacccgtgtgatacacacgttgcgaagtaatgatctccagattgatgcatttggagaggaaattctgacctctgttgcgtgctttgtttctgccaaaaaccacgccatattgttcaggattctcaagcgatttttgggtcaaaaacattaatgcattccgttcaggtgcggcatctgcatcgaagatacagatccaatcacctgtggctatgtccagtccgtcatttaatgccccggacttgccacctgttcctttacgctccattactgttacattgcgatgcatataactggtctgactgaggaatgatctcagcttctctgcggtatcatctgtacagttatccgcgatcacgatgacctgaactttatcctccggataattcaggcgcaggatgtgctctactgtcgcaacaatgaccagaccctcgttatgcgcaggtaccatgaccgtgactgttggataatgatccatatcttcagggatctgaatcccttttttgtcctgtttattaataaaacgaatcgcacctgccataataacaatcgactcgaatacggcaatccagatactaaatatagataatattaatataaaatcagccacttactttcctccgatcatacttgcgaataactttcgaccgaaagcgaagggttgcaattgttaaccaaatcgtgaataccgcaaataaagaactgacggcgatacagatcgggatgaaccaggacatatagtccacagcgcctctctccttcccgttatataagttcaactaaagattatttacactgacactccgaggacagaacaaccttccgatcgctgttatccccagatttttttgattcccttcttcataagggaaaatccagggataaaggcgaacgctacgcttcttcagattatttctgtcccctccgttatcgtgtaaatgattagttgaactatataacttatatatactcaccgatgagatcggtctctgtgtttcgttcaagggcggcaataaccgcgtcaatgtcctcgtacttgctgaattgctccttttggaataccagagcaccagagcgtatcaccgtttgcagctcatttccctttttatcaataatatgaagatccattatggcttttttgatccgctgtgtaagaagtggaagatattccacattcaccatcggacatatgatgacaaatcgcccacgatccacgaaaaatttatagtcctcataccgaatctgcttctgaatcatacccgagatttcaagcaggaactgtgcataccggacagaaccgagggattccatcaccagtggcaaaaattcaatcttgaacatggcaatgctgaatccatacttttcggagtaccgacgagcaaggttactatgtttgattaacgtatctgccagcgctcccttattaccaagcgtggtatccagatcgatttccgggttacggtcctgcatatcctggagacgttccactacacgcgcactgcgcagcagacttgccttgatgaacgcagccacggcaacgttggcagggatgagcaaccaccaggagaacacaagcacatttgcatcagcataagtaacaagccacacaaaataagaaaccagatatacaaaccccgtcacgacggatacaccaacaggcagaaaaagaccaaaaaccaaggcactcagcgacacgatactaaaaatcaaatcccctgtagtgtagctctgatccatgtacactttaagataaatcatcagttgctgcatgagggctagtccaattaaaagggcatatccccacgcaatacggcgggtaggtgctttattcctcatagttccttctctccgttgaatttatagaactcttgttcaacctcacttcttttatatcgcaacaatttatgacatgtttagacaaaactatgctaacacattgaagaattcattaaatgacaaaatcattactttttcatatttttctgtaaattaacttctcccaataaaggaaaaagattatcaaacagatgtgtgttaccgtcaaatacatatccacctggataacgagagtcctgaccacgcaacgtagtcatatggttatacaactgtttggcccattttggatcacctgaacgaacagcgagtaaaatggcgaggccatataccgaggaagattcataagagacggcaggtgtgcgtgattctcgcttatactgtccgggcagctgatgccgggtgttgaactcttttttcaaaaaagaaatgagcttgtccggtctgcggtcggtcacggttagatgattcgccacgatcaactggtcaatcagattcaccgtatcatcatacgtaaattttttatggactacatcgaaggtcttcggatagaacagtccatcgtcaggcatcttattcagcaaagcttcgtacttggcataggttcccggtttcaccatctgatgtttttccatcaattgaagagacgggagatcaacataaaccaggcttaatgtatctgtggagtgaccactcgcaaaatcgtgaaaatccacatagtatcctttattctgaaccgattgcgaaagtgtacgggatatttccgaagccgtttccagtttggcttctcttccttgtttccattgatctgctgcctttaataaagcaccaacaattcgaaaatcatcgccaagcgcgttggttgtcacttgagattcaccttttgcatccagcttccaggcaatatatttttgcggcatgaggaaataggtggtcagcagttcatagctttcctcgaataacacctgatcattcttggctacagcatattgcatccaaagaccaagtgactcagataaagcctctctgcctgctacgatgtccgctctctctgaggtagcatcttgcaaataggtcgcaattgtaccattgggattagtcatatgatcttgaacaaaggataccgtaggggatgattcattcatcacaaaccgctccttcacaaaaataattaacgctgccgtgatactgactgccaatatgatccaccacgttagccttttccggtttacccgtctcatgactccctcctgtactgatgcttctctggcataatggctcttctcctttagataggtccggctagagtctgggatgcaggagtcaagaatcgttcctctgttcattccgaaatatccatgtaggatcgccgtccaccctttttgacaaatttccagtccacctcgatattatgtcgcattcgacggagaagcatgaccgcggtctcgatctcttcctccgtcagaccatccagagtcacctgatccgaatgcacgccctctttacgaatgaattcccatgcttcaagcccagctttggtgggatacaacactttattcttcttattacccattgctggctgtttaataatgaatccatcggattcgagtttgctaatagctctggccgccgtcgtgcgatccactttgatcagttcagcaagctgattcggaataatgcccggattctcacagattcgatacagatatagatattgtccacgggacaggttcagatgctgaaactcgacattactgattgaatccagacagcgggcaatcataccaatttcacgcagcacttcttttttctcagtcaacacactcacgcccctataaaattgttgcattcgcaacataattgatggtataactactgttgaattagtttcaattttaaacacatagctcaaaccgtatatatggaacgaaaatcgttccatattcctgttatgtaccagtttatcacgtcaggataacattacgatcacccaaaggagaaacattcatgaatacaacgattgttgaagttactaatcaggaattgctcgatgcctgcttcgccattcgtactgctattttcgtcgaagagcaaggcgtatccgcagtggatgaattcgatgcttatgatacattagacgcggaggtgcgccacattctgctctacgtagacggtgtacctgccgcttcctccagactgcgcattgtggaacaggtcgccaaattggaacggatctgtgtcatgcttgattaccgcaaacacggcctgggccgtgtgctgatcgacaaactggagcagatggctgttgctgatggtcttgagaaagccaagctgcacgcacaggtacaagcttccgggttctacgaacgtctcggatacgcacccgcgtcggaagtatttatggaagacggcatcccccatctgctgatgaccaaaaaactgaaataatgaaactccaaaaaacgcctccgttatcacttctcagtgatatacagaggcgttttgcattcaggcaacgcatttgcgaactcaacaacggtaggtggcacgtacaaattgcaggcactgattataacaaccaagtatcctaacttacttgccagatccgcgttgtatcttatcccagtgccagacggcctggctcggattcggcagcgttgttcttcatttgtttactgcgcaactgtccgcaagcagcatcgatatccgtaccatgttccatacgtacagtggagttgatgttgttctttttgagcatatcatagaagcccagaatcgactcttctgtactccgttgatactgactgtgctcatccaccgggttgtatggaatcagattcacactgaccatacttctgcgactggacaacagttcagcgagctccgcggcatgctcacgttgatcattaacatcacgtaacaggatgtactcaaacatgatgcgtttgttggttttagccagataataatccaccgcatccatcaattgctcaatcgggaaagcccggttgatcttcatgatgtgtgtacgcagttcattattaggtgcatgcagagagatcgccaggttaacctgcagactgctgtctgcaaattccttgattttgtccggaaggccgctcgtggatacagttatccgtttggcggcaagtgccaatcctttgcgatccttgataacttcgatgaaatcactcatgtgctggaagttgtcgaatggttcaccaatccccatcacaaccacgttggttacccgctcatcttgacccgctgcatccagatgtcgctgcacatgcataatctgttccacaatctctccagcggtcaggtctcggctcttcttaatcagaccgctcgcacagaagctacagccaatgttacagcccacttgtgtggtcacacagacggtaagtccgtatttttgccgcatcaataccgtctcaatcaggttgccgtcctgcatccgaagcagaaacttcacggtaccatctgccgattcctgcttcacatgttcgctcagcgagttcatggtgaaatgctcggagagaacgtccagacattcctgacggacatcggtcatcgcagggaaatcgtgaacacgctcttgatataaccattcccagatccgggatgcacgggattttttctgcccatgctccggcagccaggaacgtaactgctctaatgttaatccatatatggatgatttgttcattgtataatcctcttttcgcaaaaaagcatatggcttatcggtcctacccaaaaaacctctactccgtattgtcccaaaattgacgagggaaaacaagggcttttgcatttcttccaagaggttttatccatggtaaatctgcacaacataccatatttcaccctatcgggtcttcaccattagaagtgaatgataccggatgtgtgcagtagaaccagcagaaccaggatcggagctacgtaacgcagcatgaacagccacacccggaaccatccggaacgcaggccggaagcttccgcagccgttttccagaagtatccggcaaaaatcgttacaagcagtccaccgacaggcaacaggatgttggatgctacaaagtccatccagtcgaacacactcttcgatccaatcgtccattcaggcagcaagccgagcgacaataccgaaggaagtcctacgatgaagaccgcgagtgatataacccataccgcacgactgcggctccaggacaaacgttccatgaaatatttcaccggaacttccagcaaggatactgctgacgttaatgccgcaatagccaacaggatgaagaacaggccaccaaacaagaaaccaagtggcatcgccgagaaggccgccggaagtgccacaaagatcagtgacggtccttggtccggtgcaataccaaacgagaatgttgttgggaagatgattagacccgcaatgaatgcatagatcaggtcacctgcaccaacggcgacggttgccgcaccgagagattgatttttatccacatacgaaccgtaggttacaagaatacccatccccagtgacagggagaagaaggcatgtccaagcgctaccagtgcggattccgttgtaagctgtgagaagtccggattcaggaagaaggataccccagcacctgcacccggcaatgtaactgcacgaatcatcaggataatgagcagtaccaacatcgccggaatcagtaccttgttaaacttctcgattccgttagatacccctttggctacaatccagcctgtaattaggaccgcgaccagttgccatacaatcggcatatagccacctatgaaggagtcgaactgtccggcataatccggattgttaaacaatgttccactgaatgacgtaattgcatattgcaaggtccaccctgcaataatgacataaaaagagaggatgataaaaggagtcagtacttgcagcaaaccggctgcgagccaacctttatgtccacctgctttgataaaagccgtagctgcactacctctgccactgcgaccaatcgcaagttcagcgagaagaactggcaaaccaatcaacagcaaacagacgatgaagagcaagaaaaacgcagctcctccgttctcacccgtaatgtacgggaatttccacatgttgcccagaccaaccgaactaccaatggccgccaggataaatccagcttgggagaaacgttctcctttaccagcgttgtcttgatctagattaggcttactaaaattcatcgtatctactccatcactttaaagttttcccgtaattatatactactcaccttgtcaggtcattcgaaattcgaaatttgtcgaaatgttatttttttacatataaaacatacggaaatcttcatttcataagttccttaaacacagtatgtgataaagtccgttagtccaaccgtatgaagtttcaacaaatccgtattcccaactgttcaaagcccaatagaatcaaaaagaggtgtcccctcagccatttggatgactgcggagcacctctctttttgaattacactttaatttgaagtaactcgtacttgataacgcccatcggagcattgacatgaatgacgctacccacttctttgcccattatctccttgcccagcgggctctcgtacgaaattttattatccgcaacatcggcctcggcaggaccaaccactttatattcaatcttctcggcgaactcaatgtcattaagcaacaccgtcgatccaatgctcactttgttggagtctatattgtctgaagaaatgactcttgcttttgtcagcatcttctccaagatcaaaattcgggtctccataaaggcctgatcatctttggctgaatgatactcactattttccttcaggtcaccgtaactgatcgcgagtttcagacgagctgccaattccttacgcttcaccgtcttcaaatccttcagttcgtcctccagcttttccaagccttcctgtgtcaaaatcacttcatcattagccatttttccatctcctaatcctgctatctatctatattctaacctatatccactccaaagggttagcataccccggaaaaagaaatagaccatccatatattgtatttcaatgaaatcagaaccatgtccatctcttgagatgaatttcaaggctttgttcaataattgtaccgttacaatctgcttaactgatgatgttgttttcatccgttcacttttacaatgaactcagggcaacagaagtttataactaccacatgtagcccactatatgacgtgaggtgataagaatgattggacaattgaatacaactgaaatacaggcctatctgaaacggatcggcatagatgatataaaggaacctacactggaattcttatttgaactccagcgagcacatgtacaatatttatcctggcaaacgatcgatatttttgcaggtcgtcctgcagaaatcagtcttcaagattcaattcagcttatattacagggacgcagcggctactgctttcatctaaatggtgcatttagtgttcttctccgctcgctgggttatacggttgattggcatcgcgggggagtacagcctcatggggaacaaccccgtgtgaactcattccatctcggtctatctgtgcttctgccagatgctgacccgacagttgaacgctggattgtagatgtaggtctcggcggaatgccctttgaacctctgccacttcgttatggaacctatggttcagctccgttcacgtaccaattgatgccatcatctgttgtggctgggggatggcggcttgagtacgaaccgaatgggccaagtgaaggtgtggactatgctcctgaagcaattaccagcctggaagagttcattcccaaacatgaattctacagtcgggcagtcgaatcaccttggcataacgtatttttgcttcgtcagcgggatgagaatcgcagtcatgaattacgtggatgtatgctccaaacaaatgatatcgaaggaatccggaaaacggagatccggaattataccgagtggcgtgacgtattaactgaaatattccatgaacccttggtgaattacagcgaactggaatgccaagatatgtgggggcgaatacaggctgcgcatacagaatggaaacaagcgcaagaagcatgagggtccattccatataaaggaaagttactgatccacgccgaatatgtcctcaggtgattaatgatgataactattcgtgtactccaagttccagaagtattgcccgaggcgaactggaaccaattgctatcgcaagtttctgcggagcgacgtgctcaggcttcacgttttgtgcgtcaggctgacgcgtatcgctccgtgctgggagagatattgactcgtgtgactttgagcatgttaactggactgagacctgctgagctttcttttacccgtaattcctacggcaagccttcgctcagtcaccattcggatgtacaattcaacgtctcccattctggtgattggattgctctaatctctggaagtacagatgaactaggcgtggatgtggaaaaaatagctccaattgacatgcagattgctgagcgtttcttctcccctaaggagagccagttcttggctgccgagcctgacgatcgtcggctggaaaccttctaccgtctatggacgctgaaggaaagttatatcaaggcagtgggtatggggttgtccatgccactggactccttcgccatccttcccaatgagcgggaagattggcattgcaaacaggccgggacatatctctttctcagtcagcgactggatgatggacatatgctggcatcctgttcggctggggcagagctgccgagcaagcccgagatcatcaccttggatgatctgtatacagagttagtatagagtggtgccgggcctcaacgagttggagtcagttgagttttgtaagaggtgccattaaggaaattctgctaatgttaatcaaaaaaagctaacgacgtgagtatcacgcgttagcttttttggctttatattcacactccgtttacgtctctgacgtatcgaataggactagtcccggctacgcaatttgcccagcagacggatgatctcaatgtacaaccataccaatgtcaccatcaatccaaatgcaccgtaccactccatatacttgggcgcaccacgttcagcaccaccctcgatgaagtcgaaatcaaggaccagattgagggcagccacaatcacgataacgaccgaaataccgatgccaatcaagctattatcatgcagataaggaatcgaaatgccgaagaaacccagtacaaagctcaacagatacatgatcatgataccaccagttgcagcaacaacgcccaacttgaagttctccgtagctttgatcaatctggttttgtatgccaccagcagagcgatgaatacagccatggtcaacagagccgcctgcaaggtaattccgttatacagggactcataggttgcagagagtgccccaaggaaaaggccttctgccacggcatagataggtactagatacggtgccgctactggtttgaaggaaatgacaagcgccagaatgaaaccaacgattaatccaccataagcgagcggcatcacttgttgtccgttaaagaacatcatccatgttgcaaacgcactgcccagcaggatcacaagcgtaataaacgctttattcaccgtgccgttgatcgtcatgtaattctgataccgatcttctccatatcctctgttttcaaacgtgctgtctttaagtgtagggttaccgctacgaccgatcaacacaatcacctcttcatatgtatttgatatatctgtgatactaagtttgggcgtactacgtttcaaaatctacaagctactccctcgaaaagatcgggatggcaccagaaggaatcggatgcaatccttcgattacatccttacccactggcgcaccacttaggacatatgtcccagacattgcatgttcatgtgctttttaagcgtcttatttgtacaaaactttatctacattgtatttcgcacgcatagtgttgatgatatacgtctcgtaaatttcacgatctaccggatcttcaaccaggcatacttcaatcttcgttacttcttcgcggtgattcttaattggtgatactgtatcttcaaaatgctttttgatacgtggtcttaattttcgtgctttcccgacaaataacaattctccagcggcattgtaaaacatgaaaatcccgcctagttcccgggtaatcaggtgaaaatcagtaaatccataaatgtggctaagctgtggatcagcctgctttgtgatggttacatccggtgttggcacggtaatattaatcaataggctcacttcctcattatctataggtttacatcctatcacatattataaagggacaccatttcaatctatatgaagtacaattcacgcaattttcgctattacgacaaatatttcaaaaaaaaggttaacttccctgattcaaagtggtactataggggtatgaggaagaaattgggcactgagacatacgtctttatatctacctccgtctattgtaccctatgattgaaactctttttcatgctgaattctgttacgtgatcacgacaagagtacagttagcaagaaccctagcttatagattgtagattcatcatctaatcgacccttgcagcaagcaaacctagaaagacctagattcatgattcactgtagattataagtatcacctagaaagcctgcaattatagtcgtactgaagttaatagacacacgtagaaggtcagatagctatcgatcctagagagactagtcatgctatacaactgtagaaattatagcagcagtactatagaaaatggatcaagtttcaccaccaggccccggcatactgctagggcttttttgcgtttgtgcgaacaaccaaccacacgctcagggaaacagaggtatcgtggttctttctgcggggtttataatatggcaagataccagtagagggagtgatgggatgtattccgatctgcaactgacggaggaccgccctgtatatatacaagtcaaagattatatgaagcgtttgatgctcaaaggcggcctgcaagccaaacaaaagctgccctcgacccgtgaactcagtacactcatgaaggttagtcgcagcacggtcctgctcgcttatgccgagcttgaagatgaaggtctgatctatgcagtcaaaggcaagggcaattacgtcagtgcctccatcgaaacacctgaggcagcagcgaactgggaactggactggacgacagaggtaagcgagtatgcaattcaggcagagcagtacgatctgatgaagcacggctccggagcagagcgaggtgagatatcgtttaccagcatagcgccggatgaaaagctgtttgatctgcacaacgtgaagcgggcttttctggatcgcatgtcacttgaaggcgaagtactgctgaattacggatatgcgcaaggatacagaccgctgatgaactatttactacgttatatggagaacaaaggtgttgacctccgtggcaaggacattctgatcaccaacggattcactgaaggtttcgatctggtgcttggagtgttgcgcaaaaaaagcggaaaagcgctatgcgagaatccaacgcatcacacggcgattaaaaatctaaaattgcaccagtttcaactgaccggtgtgaacatggagccggatggcctggacttgaagcaactggaacatgaacttgaggcaagtccatatgatctggcatatctcgtgccatcctatcacaatccaaccgggattgtgacgtcccctgcgaaacgggtagagatcatccggttgatgaacaagtatcaggtaccgattattgaagacggttttaacgaagaattgcgatattccggttcgcatgtctctcccctgatcgccagcatgggcaaaggcaatggactggtgtatctgggcagcttctccaaagtcctgttcccaggtctgcgggtgggttggattattgcggatgcggcgctgattgattatctggagagtatgaaacgggcacgcagcatccatacctccacgctggaccaatcgttattgtatcaatatctgagcaacggtaatttcgagaaatatttgaagcgagctcgcaccgaatataagcgaaaatatgaattggttgtgcgttgcctgaaacagtatctgccaatgtgccgaatttccggtgcgggtggtctgcatctgttcgtgcagttcccgtccgaatacagaacccgtgaactgctggaagcctgtaaagtgaaaggtgtaacgttcacaccaggggataccttttatctggaacccggtcagggtgtaaacacgatgcgtctgggtttctccagagtcagcgatgagaatatacgtaaaggcattcgcatcattggcgagacagcagctcaaatgagataaggaggatttcacatgaaagttggcgtgattatgggcggtacatcttcagagcgggatatttccctgctcaccggacaggagatgattgcaaacctgaataaagacaaatacgaggttgtacccatcgagctgaataccaagcgcgatctaatcgacaagtcagcggggatcgatgtggcactgcttgccctgcatggcaaatacggcgaagacggtacggtccaaggcacattagaatctctgggtattccctacacaggctgtggtgtgctggcaagtagtgtatgtatggataaagacatgtccaaacagctcatgcagcatgcaggtgtacttactggagaatggctgcgagtgagccatatggaggaactgtcctctattgctgttcaacaattaacgtaccccgtggtggtcaaacccaattcaggcggttccagcatcggtacccaagtggtgaaggaagcttccgccctgccaactgctgtagaggctgccctcgcctgggatgatacggtcatgattgaacagtatatcgaaggtgaggagattacctgtgccattctggatggtaagatgctgccggtgatctccattcgttcgaacgcggagtttttcgattattcttccaaatatgatgaccacggggccgatgagcaggttgtgcaattgcctttggaccttcaccatcgcgtcgaagccgcggccttggcctgttatcaggtgctcaaatgcagcgtctacgctcgcgtggatatgatgattcgggaaggcatgccgtatgtgcttgaagtgaacacgctgccgggtcttacccgtaacagtctgctgcccaaaagtgcagccgctgcaggcatttcttttgcagagctactggataccattattgaactttcattgaaggaaagacccaaggaggttacaacattatgagcctggatgtgacgattagacatagctcccctaccgatctgcaagatatggtcattctgatggaccaacttggttatcccaccacgtacgccgagatggaagagcgctatacccatatctctgcggacgcaaactttactacactcgttgctgaagcacgaggccgcgtagttggactgatcggattacagacttcttatatgtatgaaaaaaacggaagacactgccgcatcttggcattggttgtacacgaccagttcaggggctcaggcatcggccgtcagctcattcttgaagctgagcaatgggcagccacgcataacgtggattccctgtctctgaacagtggcaatcgcccagaacgtgaagctgcacatgaattctatcgtcagatgggctttacagccgggagtaccgggtttagcaaaaagccgcagattctacagcacacttaacctgccggatacgggatacgcccccttgaatatcaaaccaaaaaaagaacgccccaatccgcacattggcgaaaaagggcgttcttcggtatatatctatgtcgcatcgatgtgctgttgatgattatgggatcaatatttggctgactgtgcaccatcaattggaataatagctccattgataaacggtgcttcgccggacagcaggaaggcaacgagacgccctacttccttcggttcacccaagcgcttcgccgggttgtccttcacgaactctttggatgctgactcccagtcattcggattgatctgtttgaacgaaccgatgaccatatctgtcagaatggctccgggtgcaattgcattaacgctgatcccgtgctcggcgtattcaatcgctgcgtctttggtcatgccggctacggcatgtttgctcgctccgtaggcaaccaggtttggcacggcgcgaatccctccaacagaggacgcgttcacgatgtagccttcgccctgttttttcatcacaggtagaacgtgcttcaacccgaaaaatacacccttcagattgatgtcgataactttattgaacatctccgtctcgtagttctcgatcaggttttgcttgccttcaatgcctgcattgttgaaaaatgcatcgatacgcccaaattcattgaccgtatcactaacatacttttttacagcttcttcatccgatacgtcaccttcgattaacagaaactcggcatgctgtacctcttccgagatcacacgcttggtctcttccagcgccttcatgttcacatccactagggcaagcttcgccccttcacgtgcaacttccacagcagctgatcgtccaagaccggagccaccgcctgtaatcagtaccactttacccgcaaatcgttcagtcataatccatagacctccctttgctgtttttgacatcctccatacgtaaatacccatttcttcatttgctctaatctaacggggaacagttacagccatctctcaaccggattagtatgcttccgtactggccctgccattcctctgacctggaacgacatgacaaagaggagcacctctattagaggcactccccatgcatttcattattttaagtcataagaaattaaggacggtcaatgtagatccagcctgtttcttgttccttatctacagtagctccaagggattcagccacaaagcgcagcggcacatacgtcttgccgtccttgcctacataagcggattccaccatagtcacttctttaccagcaacggttgccttcttggaacctacggtcaggacaatctcatcaccagtgatgtcgtcaatgacaacgatttggttcgagcctttggtccatttcacttcagcatccagttcttcagacacgtagcgaagtggaacaaatgttgtattcttaacggtgatcgccccagcgtactcatcatccgggaagagcactacgcttttactcgtgattccagcttcatctttcagcaattggtatgccagtgaattggaatcaaaattgcgcagcatctgtccaggcgtaatatcatccttcatcagatccataacgccaccggatacatccacttcatcaactgcaactgcgccaccgatattccactgttcactgtctccacttacggttacggagttcactggcagatcttcggaggcaggcagcgctactttcagttcaaagttttgcttgcgaatatccagcttgctgtcgagataaaagtccaatttcagtttggtatttgtgccaaagaccgttttgaattcaggggtctcattcaacaggttgttcagctcctgatcataattgaccagcatactgtccagtcctactttgatgatggcatatagtgacgcaacggcttcatctttcgattcaggaacgatcgaattcagcgtgtcgtctcccccaccttctacctcattcacagcttcaagtacagggtagaacacatcgtacagatctccaatgaggtctttcagtccttgctcatccttcgaaatactcgtcaggaacggtttaaccatggcaagcatctcttcaccactaacttccagatgcagcttggagaggctaattgcttcgccattcacggattcctgtaccggtgttacggagatgttcttcggattggacagatgtttcaggacaaaagagaacagtttcggggaaagttcctcgagttgtttctccagtgccttcgtatctaccatcggaagcgcttgtgcatcctggaacgtatccagagacatgtacagcggtttctgggctccgtccagatcaatgaccaattgggactcattcatggacaggtggaaaggtaacttcgttccctccatgctcagtgtacctttgatcgatgctgtcttcgcatctttcattttggcttgatcaatatccagggatatggaattaattagttcgatcatttcaaggtctttctctgtagcaaattccttagccggttctatgtttatattcatggattgtctggattcaccggacttgatactcgcgccattggccattgctttgccaacgtctactccacccacagcctgacatcctgtaagaacaaccattaaaagtactagtggcactgccatccattggactaacttccgattcgtaatatgaactcctccttagaaaaatatggttcatttccattatgaaggtataggtaattcttgtaaacggatacgcaaaaaaataaaccaaaaggccggaacatgtccgacctctggtctatctatatttcagcatatcgtatgtttcgataaaacatcctgcttcattgtgcaatgctgggggttactcttgctcctgatcttctgcgagtttctcatccgtttcttcatcttccgcagttatgggagtttcgaattgatccggctcgtcctcttgaatcgctttgttctcttcgttctgatcctgtgtcatatcgcattccctctcttctaccggattgtcatgtcatcaaggcctgagccttgtgtctatcaataacccgaataggcgtagttcaaacccgccttaatatcggcatgacattttccatcataattttagtgctcatttagaaaacataaaagatgatcccgttcccacttgcagccgtggcctgaaacaaggcttggacatcatccacagtctgaacgatctcctgaaatgtctcttccgcatcccaatcttccatgacaggatagacgccttcagcgatcatttggtccagactataccgctcctttaattcttccggtgtgagctgctccaatgccatgtatgctcccagcacctgctcgttactaagcaaaaacagatccatgtccgaatagtttcccaagtattgctcacctgcgagaggtaccacatatcccaggggcggctccccttctaccaagttaccgttcagcgtgaactgcagcatctgccatgttttatcgatatccagatccactgcacaatcatgcacactgacctcacctgacttgatggattcaactagctcctttgttaccacaagatatctgccggacattcccataccgctacccctcctgtgtaattccttctattgttccccatttaaccatgcttgttggttcagaatcggggtaatccctatcaaggagggcgtatacatgaaaaaatttgattacagtctcaattatgatgagttggatctgcgcaaacatcctgagctgtacaccgtaggccggggagagcagggtgtgctgatggtagagccgtacaaaggcgagattctgccacactggcggttcaaaacacccgagattgcgacggagtcatcggagaagatctatgagctatttttggagtataagaaaaagggagatttcgtcggtatggatatggctcgcaaatttctccagatgggttatacacgggccagacgttatacgaatcacaaaggaggacgcaaatactcaaaagaggatggctcaatcttaccctatcagaatgataaggtgaaggcagaagccgcggctatattcaaagcaaaatgggagattgcgaagaccgatccagactatgtaaaaatgaagaaggaacatcgggaaaagtacgagtctgatgaagcgtaggatcaacggtgaaaagattgacttatggaaacatttgtctcagaatcgatcttgttactgtacattttcaaccattatattggagaagagaggcgcatccgattatgacagattcgttcatccacttaaacacaggccagaatatcagtatcaacgaatccacccaacttcaggtaaccattcaatgtacatcatctccttctcccttggatgttagctgctttatggtgaatgaagagggaaaagtcccatctgacgactattttgtattttataatcagaaggccgatccccatcaaagtgtgcttttgcaacaggcagaggaactgaaatcgtcttttgtactggatacaaatcaattacggcaggcccctgtggaaaaatgtgtgtttacggctaccctggatgcgggagggactttcgccgatgttcaggcatgtcaggcgattgtacaaactggttcccagcagatcacctatgagatcacacaggtcactgcggaaacagctcttatttttattgaaatctataagtatcgtgacgggttcaaagttcgtgcgattggacgaggtttctttggtggattgcagccgctggcagagtcatttggtgttgaaattgagagtaacgacacctcggaagccgaacaggttcttctcacagcacaagctgaagtagcagcggcctctccagaagtcttggcacctgatgctgcaccaaacacgaatcatgcgccgcttaacctgaccaagatcgatctcctcaagcgtaaagtaaccctgtctctgcaaaagaaaaagatcgaacctatacaggcacgtgttgctgtcgtatttgatgcatctggctccatgtaccatctgtatcgcaaaggcatcgtgcaagaagccttcgagcgtatcctggcgattgcatccgcttttgatgataacggagagttggacgtctggttcttcgccaaagacttcttgcgtgcacctagcgtcaccgccagggatttcgagaattatattgaacgcacatatacgctgggaagcaaaggcggtaccaataacgaacctcctgtgatgcaggatgtcattcgcaaatacacgatcgaggaacccgatgtgaatattccaacgtatattatcttttttagcgatggcggagtcagtcaaaaagggaaaatcatgcggcttattaccgaaagttcaaccaaaaacctgttctggcaatttgttggcctgggacaagccaattacggtatccttgagaaactcgatgacatgactggacgtttcatcgataatgctgacttttttgctctcgacgacatttccaagatcagcgatgaagaattgtacgatcgtctcctcactgaatttccaggttggataaaggaagctcgggccaaaggcattttggcctaaagcttttaccctatacccctaatcaggcttgtactttttctgctttaccatccttggaacgtggacggagcatacttcctacgattcgcaacatcaacttgcgtggcacgaggcgggtgaactgcgctgtccagtaattaccggcccccggcacagcataaggtttgcctgactcgagtgcactcatggccaccgccacgacatgctcaggggtatcacgtttgcccaccgaggcttcatcagcacccactacatcaaagaacgaggtctcggttgagcctgggcatagtgccaaaaactgaacgccacgcttcctgttttcttcgtataatgcctctgtaaaagaaagtacaaatgccttcgtcgctccatacacagccatatacggatcaggttgaaaggcagccgtcgaagagacattaatgacagcaccatttttcttctgtaacatgcctggcaagaaaagatgcgtcatgtttgtcaaggcaagcacgttcaacataatttcctcctgctgccgggaaccatccacctgttcaaaacatccatgggtagcaaatcccgcattgttaatcagcatatcgatgtgtattccccgattctgacattcctcatatacgttctgaggtgcctctacttcggaaagatccgatacgattacctcagcccttacttgatatgtacgttctatacgttctgccaattgattcagtttggattctgttctggccaccagcacaatatttttacccttggaagccatttcgagtgcaaaaatttccccaatacctgaagaagcacctgtaataagtacccattgatgctgttcctttatcatctctcatccatcctctgtgcataatttaaacagtgttttctttaggaaacactgtttctgtatagaatcatcgtaaccaaaatccatgacgctgtcaaatacatttgttaaatttgaatctagaacgtggttcttacttactaaattcggattaaattgacgtcatccggcgtaaaacagtagaatgaccttaagaaaaggaaacgtagtttctgttcaacaacaatacggttacgaggatgaaatcaatgaaggatcttaattcgggttccacggaatctgcacatacggtaacaacctttcaggaagccagactgcagcactcggataatctgcggcaaaatattgtgcatgctgctgctgctttactgcaagagcatggaccagaagccgtcacagtacgccgtgtagctgaacgcatggagtgctccaccaaaatcatatataacctcttcggcaaaaaagaagggttagccaaacatctgtatttagagggatgctccctcatggcccagcgttttgaagctatgccccggcaggcatcgttcgaacaatatttccgtgatctggcccacgtctattgggacttcggcatttctcaatctagcttctatcagctgatgtttggaggatctttttccgaattcaaaccagatggagagaccttacagggaacagcaactgcactgaaacaagtgtctgccttggttgaggtagcgattgaacagggaatgcttcaggtgcaagatcccctgcttgccgttcggatgatctgggctcccttacacggtgttattcatctgtatttgggaggccatattgagagcgaagaagctgccaaaaccctctatgatcatacgttgtcgatggtgatacactcccttgtgagtacatctgcgaatgggtaagcattaaatctgtgctgttttagatacttttagaagataaacaaaaaggagcagccccattggcgtaatacgcctagggcatgctcctttgttttgttgactcatctagttccgtaacggtttcagtcgattaacgtgcctcttcgttctcagcttcccaacgtgcaatttctttacgcacgataggagcgacttctttaccaagcagttcgatcgctctcatgacctcgttgtgcggcatggtgccgaggggagtgtgtaacatgaagcgtgtaatcccaacttctttgcgtaggtaaataattttctgagctacggtatccacatcacctacatacaatgcaccttccaggctgcgcgccgcatcaaatgtcgcacggctgtagtgtccccagccacgttcacgacccagtatgttcatgaccgcttgcgctggcgggaagaatttctccacagcttcgtctgttgtatcggcaatgaagccgtgagagtgagaagcaacagtcagcttggaagcatcatgtcccgcatgtgcagctgctttcttgtacagctccaccagtggtgcgaattgcaccggacgaccaccgataatggcaagcaccaatggcaaaccaagcaatcctgcacgaaccacggattcctgattaccgccactgccaatccataccggaagtttttcctgtaccgggcgcgggtagatgcccagattgttaaaggaagggcggtgtttgccttcccaggttactttttcagaatcacgcagcttgagcagcaaatccagtttctcgtcgaataactcatcgtagtcgttcagatcatagccgaacagtgggaacgattcgataaatgatccccgccctgccataatctctgcacgtccgttcgaaatgccgtccagtgtagcaaaatcctgatagacccgtaccggatcatgcgatgacagcaccgttaccgcactcgtcaggcgtatgttctttgtctgtgaagctgccgccgccagaatgacagctggtgatgaagcggcgtagtcggcacgatgatgttctcccacgccatatacatccagacctacctgatctgccaaaacaatctcttcaacaacatcccgaatacgctgcgcatgactgataagttctcctgtttttacatccggattcgtctccacaaatgtactaattccgatttccattgtctgttcctccctggtatgaagcgatccgttgtttatcttacctattgtaagtagatcaccttttgttatgtatcttaatattgaactattttgatgaaaaacacaagtaccccctgtttccagagggcacatttatgtttattttctatagattacagcttatctatacttagttccatcaggttggcattaattacaacaccggtctgtttcataaaattaaatcccagaattccgtcaatctccaaaccataatccatatttcctatttcaacttgaaaatcattaatcgttgttccatctgaaagttacatcagagacctctcatgccaacatatcgttctcttgccacaacttctggacgtgaagtgtgaaaaaagcagtattcccgtctgggatcttcctgatgcaattcaccataacgttttagtgcctttgtagaatcatcaaatgaatcaatcactgccatctcttcaatataacgccggccttctctagaatgcgccttggttgcctcaaaaacgacccactcattagggaatcgctcctgaacttccttccattgcatagtgacacctccagaccattagatagagatattatatcatgtggaaacagtattccacgggctgaaattctaaaatacatagatttttagagcattgcctgtaagtctattattatttcttcctcccgatgtacagcaaatgagacgagattcccaatatggaagggtctttggcagcttcaatcatatattgcatgagttcatcatactcgccactctctttccagtattgctgctgctcgtccgtgagcatcgctctaagactggatgagccaattaaatcaatggtttcaaatccatgttgctccatgaagggtataacgtcctgaatattaaaatagtatgctcccgtaaatcgtccttgatcctgatgattgaatatacccttttctacaaaagaacggatggctgccatgttatcatttggtttccaatgctgcggagattgtaacgaattgatactcatgcgcattcggctctgcatggctacaaacaccacgccccctcgcttggtcacacggtacaactcttgtacagcagccgtgcgctcttcgtctgtctgcagatgatataacggccccagcatgagggacgcatcgtacgtctcgtcagccataccggagagcgaagtggcatcgagaacatggaacccatcgaattgctgtgttaaaccaaactcctgagccttttgcctcgcagtatccacagaggaaggtgtcagatccgataaagtgacctggtaccccagcttcgcaagctccatggcatacttccctggtcctgcgccattatccagaatacaaccagtagaggggagatgctccctgatgtaatgcatgttaatgatgaactcaatcggttcccgctccagtctcccccactcatcaaacccggaataatattcaataatgtgatctctcttcatcgctctgacacctgccttttcttatatgtagactactcatccatgttcaaaaaaattaaattccaaccagtatatatctactaaatatttcctgtcaaacaaaaaacgttcaattcccattgaatgcggaactgaacgtttctcgatcttatatctttttcacaaactcagacttcaacttcattgcacccaagctgtcgatcttgcaatcaatatcatgatccccatcaatcaggcggatattcttcaccttcgtgccctgtttaactacaagcgagctaccttttaccttcagatctttaatgacggtaacggtatcgccatcactcagcacatttccgttggcatcgcggattacttttgcatcctctgcgttatcattgtctgcttccaaagaccattcatgcgcacactccgggcaaaccaacaggttaccatcctcgtacgtgtactctgaattacatttggggcagttaggcaaattagacatatgtattaaactctccattctacgattggcattcccgcaagtatacgggatttcgacggtatattccatacgcttggtcactgcatggatggatttaaaccaaatttaaggttcatgcatccctcactttaagggtaactacttatgatgtaactaatagatacgcactacacatacatgaattttaatgtctctatgaatgttattatatttaataccaaaggagttcctactcatgtcctcatatgttttccctgtgcaaacagcttttttgatctttgttgttgcggccatgttcttgctggtgccgtggttgatctatggttatcgtaaagacggtttcttcagctggtcacggtttggtatcagcttttcgtttatcttttatattctggccgcctattgcctcgtcattctgccgtttccgactacgcgagatacctgtgcgcagcaagccgctgacacgatctactacaatctggttccattcacttttgtcaaagacatcatgaaggaaacacccattgtatggacccagccttccagctatctcagcatgattcagggtagagcctttctgcaagttctatttaacgtcctgcttcttatgccgctgggtgtatatattcgttatttttttcaaaagagatcattctggaagtacgccctgcttggtggattcgggctttccttattcttcgagatcactcaaatcaccggattctacgggtattataattgtccttaccgcctcttcgatgtagatgatctgttattgaatacttcgggagcagtcattggattcttcacagcgcccatcctgcttgctttattcccatcacgtgctagcattcaggcgaagagtgaacagatcgtggagcaaaaccgagtgtatactatgcctcaattgctcgcgttaattattgatggagtcgttgttgtcttcctttcgaatctgatatcaatcttcacagcatctgatgtgatcagtgatgcgctaagtacatccattgctatggtcattgtactgttcttcataccttgggtgcgaaatggggtaactccaggctcggccatcttgcgattccgctatgtgaatcgtcagaccggcacacccaccagtgaatcgttattcaaaagatttgccgcactctatgttccatggctgctcgttacgatcattcgcttggtcaacgattatgctttttcaggtcatcaggatgttatgcttcagccttatcaaatgtggatctccttgggaacattcggcatctatatgttagtctacgccgtactctttgttcatgtcttgatcgtgctcttctcccgtggaaaacgttccttctacttcgatgaggtgtcccgcacacgtgcctctcgtaaataatgtttggagtataacggcacaatgtacctcttcagtgcttacgttctgcttattattcagccggattacaaaaagaggacattcattatgagatgaacgtcctcttttgatcgggcccatagcagttattcagagtatccattcaaataatcagcctggattataaccctaacagctctcgcttggctgcatccggatcatgtacgacctcaatctcatggttgaagattagtgtcgcacgatcctgctcatattcaggccagttcacacctgcaacttcaggttggccattcttggcaaaggaaatccaggcatcctgtaccttgagggcaagtgccgccgcggcttcatccggctccgcattcatgaatttgaggacatgcagtgtattaaacacaaagaacatttcgatgctgtgaatcgctctttttaacaagggatgttccggcatgacccaatcaaatcgatacatccacactggggcatacttctgctgtgccgcagcatattgcagcgctgaccgccagaagaacatatcggtcatgacttgggcttgtccatctgccgtttttggataactatccgcgatggctacccggttctccagatctggggtcataaagtctacgccctgaaccatatcgatctcttttgaataaggcacatgtggctggatgaacagtgcaccctcgtgtaatgtcgtaccaatcagcaccggaatatcctgcgctgagccttcgctcactgcctgaagtggcatctgtggtagtgtctgcccatccaatacaggttggaacaataatgccatacccgccccgctctgctgtttgaccgtttcacccgctgcaataatctgctctacaggaattgtatttaacttctgcaggttgtcccggtccaccccaagaatctttaacatcccttcccgcaacgctgaagcttgctctgccggcatgaactgggatgcaccgctctccataatggcacgttggaacagtcctttggccgctggcatcgccatcagtgctgcaatactcatgctacctgctgattcgccgaacaccgtaacttgatccgggttaccaccaaaagcagagatattatccttcacccactgtaatgccgcaacctgatccagcagacctgcattggatacatatgaatcacctaatggagccatatgcaggaatcccaaaggtcctaatcggtagttgatcgtcacaacgatgacgtccccccgaaccgctaactgtgtaccatcatacatcggctggctacctgaacctgttacaaaggatccaccgtgaatccataccatgaccggcagtggtgttgctctctttcccttaggtgcccagatgttcagatatagactatcttctgactcattcggaatttctgtctggccttctggttgatgatttcgtggttgtatattctcaggtccaaattgattggcctgtctgattccatcccatgactcgggctgtaccggagccttaaaacgcagctcacctactggaggtttcgcataaggaatgcctttccatacgcttgcatcgtgcaaaagttcgccttgaacggtaccatatgtcgtttgaacttgaagttctctcatgccacttctacttcctctccgtaaataggttgaattaacgagtatgtgcatatcatgtgtacttatttgagtatagtttgtaatcatacccatttacaactttacccaactctagcctcccctgctacgtttcacgtggaactttatggggtggatgatctgatacatatctttaagatgaacaccaaaaaggccacccattaagcaatgtcatcaagtttaacttgtcttaatggcattgacccttagagtaaccctttcctttttagcatccaaataactacccttctacaggataacttaccgtaaactcagcaccctcaatccattcgctcgtaacaaagttccgcccctttacaaccactcgatccttataaacctccacatgaagaccttcgctgccctccagatgttcatcctgatccgtccatagataacctacagacgacgcattgaacatcgttggcatgtggcctgcaccatcgtacatcgtatgctgtgcttccagttgccaatgggtatgaccggagaagagaatcacttgcgggtaattggccagaacggccttgagttccgcattctgattcacaccataccagccttgttccttcatcgatcctgctaccgtatccataagcggctggtgtaagaaaaggaagatgggatgatctagtgttgcatgctcagacaatttcgcatccagccactccaattgttcagccgacatatcacaatccttcggatgaggttgctcggtgcccaggaatatataatgatacccatcaatccagtgatcgtggtaagagcccttcatgcctgttgtctcttcaaaatcacttaatcgacgttgccataaccctgcgactgtaatggggttcactcctgaagagatcggtcccccgtcttggccctcctgctcagaagttacagcagacaacgtataggtcccgccggatagttgctcaattagtgcagctgattcagcagcggtttgttttgtgaccagttccatatctgcttcctgctccagcaactcagctacttcaccttctttcatctcaagcaaaacgatcggtggatcttgccataccacggctccaatatcatggttacctaccgtgtaccggatatccggcaagtgctccgcatgttgcttccatatgcgttgcaactcacgatattcgctcggcagacctcgatccgtcacatcgcccacatgcataatcccgctgctcccctgactgaatgtagctatgtcggctaatgcttggtccagatgccggttatgaatatggtctgcctcatctcgcacatgtgtgtccgtaatgacctggaagctaacaataggttgctccggtgtatgttcatttttcatcaggaatcactccatttcagtccaataatgccaatcaaaataaaaccgatccagaccatcgacgtgagccgcagacgttcaccaaaatagtaatgccccacgacgccaataagcgtaatgcccacgccagaccagatcgcataggccacagccagcggcatatacttcactgcaaaattaagaaaggtaaagcttgcgccataacagacaaacatcaacaccgaaggccataaccgtgagaatccatccgatactttcagcaaaatggtagcgctcagctccagcccgatggccagtgccaacaggacccagcccaagtaggcatgactatttgtcatcgattcagcccaccattcagcaattcatggaaggattgaatcgttctatctgccaagcggatttttcccggttctccaatgccaagcctgtaccccgcaccagcggttcgtgccatctccatgtctccgtccgtatctccaatgaccaccgtatgctgtacagatactcccaaccgttcacaggcaagcacaagcatatcgggaaaaggtttgccccgctccaccagatctgtgccaatcaccacgtcaaaaaaggaatccaaccccatccactgcaaatgtttaattgcacttggtgtatcatctgccgtcactacacccataaccataccttcgctacggcactgttcaaggaattctcgaacacccggtaacggatgtgccggacgatgctgctccatctcttcctccgctcgcgccaaacactcccggaccataatcttggattccgcccagctgagacccgcacgatatccatgccacgtcagcacggcatacacttcatccatcgtgcccatcgcaagtggcccccgcacatcatacccattcatccggccttggtcatcgtggaatgtaccccagatctgtgggaattcatctgtgtcgatacggagtcctctagtcgctaactgttctctgaagtcgttcaacacacaatcggtccagaatccccacatgcccgtaaaatcaagtaatgttccgtccttgtcgaacaaaacggcttcaaccggattccgtaatccgtccacatacgtctcatcttgcattggttaaactccttgtctgcgatcttgtatgaacgaaaaggacggtacagcatgtaccgcccttttcgcgcgagtcaattgcctgtatacgtttcttatttcgttacacgatccagttctttctgggctttttccttcgcttccttcagcgcctgctccgctggcatattattgatctgcacctgatcagctgcatctttcaatgcatcattgatcttgccccccgttggatcctggaatggagccgaagcgtgagctgcctgttgcagtggtacagtgatctgtggattttcctcactgaatttcataaactctggatcttgttgggccgattgacgtactgcgatatatccggtgttcatggaccatgaagctgtgttcgaagtttcagagaaatacgtaagccatttataagctgcctgttgttgctctggactcgctgctgacggaatacctgccgaaatggcacttgctaccggttttccttcaccaataccttcccagcctggttgttgcatcgcagcgactacgctaaagtccaagtcgccttggtcaccactagatccggtataacctgctgctttatttttcatcacatcatcaatcgttttgtaccagtactcccagccctgacctccataatgaatgcccataatcttgtcttcgttaatccatttacggaacaagtcccatgtctcgatccactctggggagtcaatcataacggttttgccatcgtcgctaagaatctgtccgcccttacccagcacggcatcaatcatattgtctctaccccacatcggttcccaaccgtagaaggtggtcttgccattttcttgtttgctcatcttcgcagccgcctcagccagcttctcccatgtagtcagagttgctgggtcgattccgttctccttgaacgtatccatacggtagtacatgatctgagttgtaccgtacattggcaaaaagtattgctttccatccacctgtccctggttcaggaatgtctgaatgaaatcgcctttcttaaaattcggatcagctgcaatcatctcatccatgggtgcataatatcctttgcgtgcccagtctatattggagctgagtacagcggctggaaccttcttggaagcaattgctgcttgcagcttctgttccgtttccgtgtaatctgcttgtacaatcccttttacaacgacttcgttctgggaggcgttgaacgcatcaatcgtctttttcatgttatcgcccagattaccacccagaccataccagaactcaatctccaccggatctttcgcctgagcttcggttccactggcagcagccgtcgtgcctgattctgcgggtgcttgtgttccacaagcggtcagcagtgcaaagcttgtcgcgagtaccagcgacatgccacccttccagttcaacctcaatctctttttccatgtcatgcttgcctgactccaattcattgttgttcctcccgttttaggtgaatggtagtgcatatcagttcttgttaacaccagccgtaatattcacgctctgcatgatcgtcttctgggtgaacaggaagagaataagtagaggtgcgatggtgaaggcactcgcagccataatctgtggccaagcaagtccatatgccccgccttctacaaagaagctacgcaaacccgccgataccagctgtaaatcaggatctttggtgatgagcataggccagaaatagttgttgtactgttcaataaacgtaatcagcaccatcacggcgaagcttgagcgaacaagcggcgtaataatcgtccaaagaatccggaagtgggatgcaccgtccaattgtccggcttccaccaattcatgagatacctgcatgaacgcctgccggatcaggaagatcgagaacacgctgacacagttggatacaatcaagcctgtgtaggaatccagcaggttaagttcgctaagtaccaggtaactaggcagatacacggccgtactcggtatcatataacccaccagaatcagggatgtcagtgcacctttgagacggaatttcatatgtgtcagggcgtacgccatcatactggaattgacgatctgaaatagacagatggctaaggctaccccggtactgttcaggatgtaacgggcaaatggtgccgcattccaggcatccacatagttgctccacaggaacgtctccggccagaaggtcggcggaaactgccagatctcatcattggttttgaacccgctaatgaccatccaatagaagggaaaggctgtacccagcgcgatcatggctaacagaaggtagcggattaatttacttattttaaaattcggttgtgacacgttctgcaactccttgcgcttcatccgtttagactttttgttgggtaatgtcattgtcattagtagtgcaccagacgtctgccaagcaggaaagatactcccgagagcaacacgcagatcagaatgatcacaacggcgatggacgaagcttcacctacgttaaaggattcgaatgcagactggtaatacatgtacagcaacgttctcgttgatcccgccggtccaccctgcgtcatgacattgatctggtcataggcttgcaaggactggatggtaagaataattgagagaaaaaacgtcgttggtgagatcagcggcaatgtgatacttctgaacttatcccaaccgtttgcaccatcgattgaagctgcttcgagcagatcggaaggtagatttcgtagcgcaacgagataaaataccattgcccacccaatcgacttccagagcgtgacgatcagaacagcaaccaatgcccagtccgcgtcacgcaaccagccgatcggagatacgcctacccagcccagcatcagattagcgagtcccacttcgggctcgaagatccaggaccacgcaatggaaaccgcaactgtcggggtgacccaaggtgaaaagagtaatgtccggaagatgccggatgatttgatcttgctattcatgagcatcgcaagtgccaatccgcccacaatagttgggattacactccccagtccgaataacaaggttactttcagtgatcgatagaattcagagtttgtcagcagataactgtaattgtccaaaccaacaaacaacttgtccgggctcatgaagtcccaatcggtgaaactgagataaacgatatatcccagaggtcccagccagaagatcagcaatgggattagagctggcagcgtgaatagtaccgcctcagactccctccatagttttaaacgcaaatcccccactccttactgtccaatttttctttaatgattgggaatttttgagtataatcagctttatatttattctgtacaaaattaattgtacactcgtattgaaaattctaattccggcttatgttaaaattggagcaagtcatgtaaaatatgaggcagcaagtgggaacgctatcataaaccagaggtgacattgtgggaaaagaaaccgccgggaacccgaatcattcttcgttacctgatcggcatgcgctaagggagagagtcattgaggccatcgccaatacgatggatctatatggggttaatcatacgtttggcaaattgtacggcatcatgtattttgaggatcgaccgatgacacttgaagagatgaagaattcaatgaatatgagcaagagtaacatgagctatgcggttcgttcgcttacagaatcacagatgatctataaactggaggaaaagaaggagcgccaggatcagtatctggctgagactgacttttatcgtacgttccagaatttcttcggagccaagctccaacgggaagtagatgtcatgttagaaggcattcgtgaggtcattcctgacctgtcggccatgatcctttcggaacatacctcgtccaaagatcgagaggatgcactgcgtgatctgcacaaactccaacatgcggagcaatactacgtctggttacaaggattcgtggatcagttgcgggatggtaagttttacgagaatgcttcacacacgcccgataaagagtagtacaactgcgtgaacagaataactaatgggtgatcaagcgctaaccaacctagaccaatgttaagtcacactaaaccgcaaaaaggagctgttcctagccaatgtatggcttttggaacagctctttttttattctatctattgtattgtcatatcctatccgtttttaggggttctcttttccatatgccactgcattaatgaccccttttttcttttaaaaatattacttttgcgctgcagcttcgatatttgcatatgcccagtgtgttgctggcacatcactgaacgttggcgtaacttcgccagttagtggtgtgcggttgaacaatacattcaacactttcaccgcttcagcacgggtcagcttactgtccggtttgaatgtaccatcgttgtatccaaccatcaggccagcggattgtacgtatgcaatcgcctctgctgcccacaggtctgcggatacatctgtgaaggacactgctgtaccattcactgttgtattactcgcttgttgctgcatccagcgatacgcaatcgttgccatctgtgcacgggtgatcgaaccttccggtgcaaattgagtgttgctcatgccgttcatgatgccagcggattgcgctttttgaatctcacttgttgcccagtgtgtcgcagatacatccttgtagctcacgctatccacggaacttgctgccgcttcagttggaagattgcgagctagcatggctgccatctgtgcacgtgttacgaatgcatccgggcggaaatcc

SEQ ID NO: 5 - DNA, 525987 bp, Paenibacillus xylanexedens
  source 1..525987: mol_type = genomic DNA
agttatatttcgtttagcattctagattattagagctcctctaaaattctttatgaattagaaagtaatctcttaagaatgatcagtataattatgtgtccagggaaaaatgtataataaaagtacttattaattttaaatctatcatagctattcaataatataatcagtatagaagcaaccaacgaatacacttgaacaacactataatgataaatctccaaactagccaaagttattacagtctgaaagattaaaatcaaatgatattttttatgaaaacagtagaaaataactatagtaagaataccatatataccatagtcaaaatttaaaaactcacctactaataaacaaatagttactcctacatactttaaaataggatttatttgatttctgagtagttcgatacaaataattccaaacaaaagtgtaaaacaaacattcaagttattatttttaaataatagcgcataagggatctgtgagataagagctagtaataatattcttgtaccatatttttttacactccttgtttttctaataccgtttgcaatactccaagcaaaaaggggaaaggacaaccttccgattattgtaaatataattgttgttggaaaaaaaacgtatcctatatgatcaacaagcatagtgaacactgcgataagtttaagcatgattttccttaccttctattataatcaaaaaagtaataatgtattaagtttagttaaataataaactccaggtagcttgcctatttttttcgtaattatctcttctttttctaggtcaattagtttgaggataactcgaccttcaactgatctatattctcttgtaataattatgtttctatatgccccaagaatactggttttttcatttgtcctaaacaactctttttccccatataaatcatgcagttcatctgcgtcatctagctttttaagtccataacaaggtttatctttatcaaaaatgatcttatggtatacttccgtcattccaaaaatattattctttttatcctctaaattcttagtatagagctcagaaatgtttttcttgaagtcttctttataaatatataagtttgaaccatgaatctctatttgtattaaagcagagttcatatcaaattcatgaatgataaagtcttcatttatagactgattatatttaatgttcttaataaaagaacttaaaggaagtaatgaaacactctggaatttggttctccaaggcaagttatcagtttcattattatcccacaggtctcttttttcccatgacgatatcctaccagttactagcataatatgggactctccggaaatttcaaatatcttaataaaggatagattattaatataatctttagatccaatcaatttagggattttataactcttctgttctttaatatcaattaaaagatgtccactatcgtcggaattataaattttagtagtatctaaattaggtacagcaaaaatacagtatctatcatcaatacctatgatctcaacacaattaatctctgtgtcttctaaattatttataagagaatcacatctgtttaaattaaatacttttttacaatccattttttgaaaatcaatttgatagatattaaaatcgatatccctttcatttctatatatgttaatatagtagctgtaattctgaccaaaattattatcaataacagaagctttttccttaattttaaaattttcgacgatttctccatttataatgtcatatttcagaattcctgttaaatctcctatgttactatggaaatcataaacaaaaaagtatgaataattacccttagtaaagttggagcttagaagaattttattttcaaggttatctacttgttgtatttttagcattgtaaaaaccctcctttaatttagaaataaatgtacctctctaaaaaagagaggtacatttgttccaaattttacttaagtcccattcagaaaccaagcatggttcttgaactgagttattctatcaggctctaatggatgataatgcggataatgaccttctaccccttgatgctcgctgttatattttgataaaccagtaactgctcttgcagcctgatcagctttagaggatgttctagcaaatacactgttctcaccagaattttttttctttatccaatcaaaagcatctctatcagatttgaaggcctcacctcctacataaatatcattttttctgatccatgcaggccagtaattatattgtttgttcttctttatatcagctgcaatatctgtaataacataagcggtaataccagcaatagtcatagagagcgcatgtgatgcaagccaagccaataatgctgagccgccccattgtacaacaggaattaatgccgggagttgagccgaaactctatcaacattatctgaaattttaaatacctcacctgtgtcgacacttgtaatcgttgcgtcaacaattggaccatccaatgtttctatatcaaccgtatacagtgtggtttcatacccaccctcagttacacccaatatagagaataggttttgttgctgcttttctactgcttccattgtaacttcactagtattcttatccatggtggcataaagttcatcaccattatctcttgttgctttaactttgacaatattatcatctttctgaagaagttcaaaattaaactcactatccgtattagttgaatcagtagctccagtaggttgaattactactgttagaattaatacaagacttaaaagaattgatagaaatttcttagtcatcaaaattatcctctactatttaatcttaatgaaaccccatccaaattcactatcgtatccttcctctccaatatcaagagcgatagcttttaattgttcaaaaagatctctttcattgaaaaaagattcttgtaacatcaaagctatcattcctgtgatatgaggagtagcaatcgaagtaccactaacatactggtatttcaagtcattggatgtcgtaatcacatctactccaggagcggcaaaatcaatatcatcaagtgaagcagtttctccctttcgaaagtttgaatccaccgaagttacagcgataaccccatcgtaagatgctggaaaaccagacttaccatcgtatgaattagaaacactagcaactataataatccctgcatccaacgctttctttatcgagcttttgagatctgcatgatcggtaggaagagcaaagctcatgttaataatatcgatgtcattatcgatacaccattcgattcctttttggatatgtaaaaagctaccttctccaaactcatcgaggactttaacagggtaaatttgcgaatctggtgcgattccctttataccaatcccattgtgctttgaaccaattattcctgtcatcagagttccatgcccatagtcatcaattggaagattattaggattaattgcattataaccatcctgaatatttgaacttaaatcaggatgattaaagttaactccactatccatgatggcaatctttatcccagagcctgtgattccttttgaccaatagagagggatattcatcttctctatcccccaagaaagaaattcttttgtttcatactcttgaatcggaggaaggctgagatagctattttgaattttggtaagcattagagttataaaaattgctatgcaaaatatgatgaaatatttctttttcctgatgtcactatgcccctttgcatatttatctgaaagttggccaactgttcatttgaaataattccctattatatgggatatatcttatattatagtgttaaatcccattaaatcaacatttttttctaataaaaagacttatatgttgtaatttatataatagttataattttcaatatgtgtatataaacatattttgaacaactagtacttttgtttatttacatatagccgctcagtatattgatttaaagggagcctattaatattcattaagtaagtattctttttatttcagaagcagacttaaggagataattgaaattgattagactatactcactactttaataattggaaagtgattgttcaccacattcaataacttatttagtgattatcttctatataaatctctcagaccctcagtatcaacgcttccttgattttagatagatctctatatacattatcattctacttgccaagcgtataaggttgtaaaaacattcgaaaaggcaacttgatcgactttgttaatcatatcgaatagtaacatagttataccatccacaatggaaaatacatatataataacttcttttccacaaggataataagttctaattttagctactacttgagtaccattttttcattaaggtgatcaccagaccaattattattttatatttattaagaagcataacatcgtcaaattcaaattctgtccctgttgtttttcatatatataaaacactaaattaagatctccatattaattgaaagtattttaaattatattatgattcctcacaagctatccaagactgcgaaaaacagaaaacttaaaaggatcacctcattgaggtgatccttttaagcgagcagcttttataatactattatatccactcttttaagatttataccaataaagtagtgaagtatcttcaattatgttaactagtaattgctttaagcggggcagctatttgtatgacaccgaccacgaggaatactcttatatggaatgtgagtaaacgctaccacttctgcaccatgttacgaaatgctcacaataactccctaagtctatcagttgttgaatatagttattcaagatggaggtcaattttcgaatgacaagcacccataatcggccacgcggaaaaatacttgcagctgtattaactgcaattttcatttcacttgcaatggggatatatcactatgtccctatagatgaaagattagagaatacttactattattcattcgggtataaatttgcggttggattattgattaacctcgctattttacttttcttacttacgccactttctatattggtggatggattacttttatacagaaaaaaagataataagtataaaagattgctcgttgcaatcgttgcatatggtctattaggcttcataggtgggatcatctactcgatatttacacgtaacttcaatactttttctgctcaaactatccacattgttgtatgttctcttgtctttttaaccttccagttggtattaaatcggagttttttcactcatcttcacaccgataaatagattgcgtacgacttaatccataaggtttccatttgataaacttatgtttccaatagtgatggcactttagtatgatctttggtatcatcacaaaaaatggataactctacgaaaaattaagagcagtctagaaaactaaagactgctcttaatttttcaactaacgtttcccgttagctaaatacatcagatgcaaggtttcatttataattaaacattttcatttactaattcatcattccaatgattatcggtatacccacggctgttgttccattctgctaacatttttctttgtctcaattctaaatctctgtaaggggcagcaacaaattcgatgtcgtggaacagatcattataaataggtaattcgctatttaattccttgaattttttaaatgcacctatatccttatcatttgcagcccaaaccacttttttaatcaaagacaacacgattgtacctgtgcacatgggacaaggctcacaggtagtatataaggtaagttcattcttaggaataaatttcttgctctcaagatgaagtatcacatttccggcttttcttatagcatccacttcggcgtgagctgtagaatcacagcttgaaaaaactctattcctacctcggcttacaactgaaccatctgcatcaacaataattgcaccgataggaaaggtaccctcatctctagccttttctgcttcttcaaaagctaacagaaggttttcgtaatgcttgtccatcttatacacatcccatctcagtaattcccaataataatataccagaaatatactgctactccttctcccataatgctaatttttttcttgtaccgctacgctaacctgcccataaatgaaaagtcgtcataatggggactcatggcaactttatgctcccaatttcgactactaatggcaaacttatgcttctgtttgtgttccgaaaagcaaaaactaacggaaattaaagcaattttcggcacacatatgggtaaaaatttatcttcttatgggttaagtcacattgcgtgccgtcatatccgtttttctaaactcttcaacctgcttactatgcggccatgtagtatccatcactcaactccgaccaacttataacgaacatcaatctccccatctttgaccctcatctgtacctcacccatctgatctgtccgataaatatctgacccggtagcctccagacgttccatcactcccggattgggatgcccatatgtattgttaactcctgcagatatcacagcggttttggcgttccagtattggagccaggcttcagtggacgacgttttactaccatgatgagcgacctttagaacatcaatggagacagatgctgaagcatcttttgaatcaacctgcaacggtcgtgtaagtaccctttgtacaaagccctctgtaactccaatatctgcacctttctgttcaaactgggcagccaacgagccatcctgaatcatatagagcaggtcctgctcggctgctgcatccatatctccggtgaacaacatggaagccccggccatttccagcaaaaagacaaccgaatcatgattctggtgttcagatacaggcaaattgcctgattcaattacatccatatgtgccagatccggagctataaaatgtaaaattgtctccttatcagccttataggacataccctgccgaatggcgtatagagggattttccgttccatggctgtattcagtaacttatcaaagttatccttaccgctggtcgttccattaaacatgaaacgtttaaccggaatctgttccagcacagcctgtagtcctccggcatgatcctgatcggcatgcgttacaattacagcgtccagttgatggatacctctttttttcaatagaggaacaacgaccttggctcccacctcatacggatcacgtcttgttttccacgattgttcgttgttcccaaaactaaccgttcccccgccatccaccagaatgtgtttgccttccggggttgtaatcaatgtactgtctccctgaccaatatccaaaaactgcacgatgccggttccagcaggcttgggagtctgatatgcccaccataatccagcaataaagctgattgcgagcaacccgcacaaccattgctgagctttactcattcgttcatttgaataataacctgcacctcgtgtagtaaatgcacttgtatattccggccaggcaatactggctcctaatgtcgttaatgaagtttcttttccatctacacggttcttaccttgatcctgtaacacggcagacatcgaagagcgaatgcccatattcgccattgacactgaaggttgtcgcctcacaaggggagccgtctcttcctcaacaaacgctgttgcttgttgctcaccattgccacgatgcaacaggtagagtaaggcatacaacacagcataataggcggcaatccataacaagggcggtgttgcccagatcaatacaaaacctggcaggctgttcatccactccacgcttacaaaagtcagttgattcagttgcatcgctatccatgcgaggggtttcgccaagggaacccatatgaatgacagtaacatggcgaccgtccccagaggtaatacaatggcactaatcaaagaaaccagcagaaagttggccacaaatgagagtaatgagaactgattgaaatacagaatggttactgggaacgaaatcaactgagcggtcactgtaacggatgccgttgcagccagagatttcggccagccgctgaacagccggttaatcaatggcatgtagatcatcaaacctgcggtcacgagaaaggataactggaagctcacgcttagcaaaaagtacgggtcccaccacatcatcagcaacgctgctgcactgatcatctgaagaccgtctctggcgagaccacgacgtgccatatacaacccaatcatggacatcattcctgcccgaatcactgaaggtgaacctccggataacagtacataagctggcaccaggatcagaacaatcgtgagtgccgtctctctggtaagccttagccaagatagaatgagaagcaacgaagcaacatatacagcgacatgggttccggagattgccaggatatgcgttagaccgagttgtgaaaactgaccataggtacctggatcgatatcagtagccatcccgataataagacccttcatatatccagcatgaggctctggaaataactgctcaaccgccgagaccaacttatgcctagtccaatccgtccaccttagtatgttatattgtccaagtccctcaggagcaactgctgttaccgaactggctcctttcactttgaacaaccagtggatatgcagggtacgcaagtaactgcgataatcaaatccgccaaagttcctagcttcaccaggaaggacaaaagaaccattaagcgtaatcaaatcgcccctcttccagcccgctgctatctgttgttcttcttcctccaacagtctgacttgtaccatcaattgttcatctatgttgaatgcagataatactgttgccagatctgtatctgctgacgaatccgatgttgccaatattgaagacatctgaatcttaaagtcagcccgatctccatcaatacgtacatctgacacaagctcaccctgaatttcagctgaccatccgtccaactcatgagcagcgatatgcatggtctccgacagactactatgattgcgtgcttcattccactcccaatgtgcagcgcctccaataaaggcagcgagtaaaaataaaacagaccatccacgcacatccataaaacgaagtaatagaggcaaacatgccagagctccaattaacccccagattaacgtccagcctgttaacgcgcaagctatcccgctcccgcacaaccaacaaatcgtaaaacttaataatggtctgcctttcatttctacccctccttcatttcacccgttgaacgcagaaaaacccccggaaagccaattcaggcttgccggaggttctccctcacgtattcgatcatatttacattaattgctcacggtcatcatcgtttcccgcgggggctggtaattctccagcctgcggaacgttatgcccttctgttccatcatatttgtaaccttgccggtatctttaggataagaacgatgaaacacgatttctgtaatcccgctattcgccagcatattggcacatgtccagcacggttcgtcggtcacatacacggacgagccttcgcggtcgattcgatctgtgaataaaagcaaattttgctccgcatgaattgtgcgaatgcatcgttgctttttcaccatttcttcttgcccatcggtcacgaccaactcatactcttccgatatcatgcaacctgcttcagaacaatccgggacgccggtgggcgcaccattataggctgttcccagcagtttctttccctgaacaagaacggcacccacatgacggcgcgaacagcgggaacgggtggaaaccatatacgcgatgtccataaaatacgtatcccagtccttgcgtacctctgtactcatgctgctttcctcccgcttaatacaatttatattttaattttaccggatctgcacatacggcgccatcttctccagcatcttcatcccgattcctttgacctttgtcagatcactgacttttgcaaaaggaccatgtgcattccgatagtccacaatagcttgagctttcttctccccaattccgggaagctcgataagcttggagacaggagcggtattcacatcaatcttgccattgtcgctagcttcctcacgaactacaggtggattactgcttgatgccgtctcggaggtaaccgaaggatcagaattcgtcccctgtgtaactggttcaatcgaatttgaggtgtccggtggattattattcgtctgacttgtagtttgaacaactgaatcaccttcaaccccaacgctcgcaagctctttagactcatctgcctttacatcatttccagtctgcagcccacttgccttggttcccgaagaaaatgctcctgtattgccctgaaccgaattagccgactgtacagcagggagttcctgctctatcgtcggcttctcggtgccgagctgcaagggttcccagccactaggtggttgttcacttttgcccgaccataatataagtatacttccaaccaccgcagcagcaatggtcatccctttgttccatctcattcctccacacctctccctgaattcaaaatcattcatttcgaacacgggcggtgcttccgaaccgttgaactttcctgatgaaacaagttgtgcatttttcatgtcatgtgaaacaggtcctcacgcatagaatagagggaatgaactgcgccagtaccgtaaagcatgaaaggaggcctgaaacaatgaaggttggatttatcggaaccggcagcatgggcagcctgctaatctatgccctgatccaatcgggtgcacttgagccccggcagatcgcggccagcaatcgaaccccgtccaaagtacgtcagttatccctccgttaccccggtctgcatgaatcccagagcaatcgggaaacggtgatccgaagtaatatcatcttcctgtgcgtgaagccgcttgaattcaaacatgttattgacgacatcctgcctgtcgtgaatcccaatcatataattgtctcgatcaccagtcccgtgcagctgcgacatctggaatcttcacttccttgcaaagtctccaaggtaattcccagcgtcacacaccaagtcggcagtggagcatccctctgcatacatggcgaacgaatgaccagtgaagaccgcgctgtgttggaaagtctgctcagtcatataggcaggccgtaccaagtggatgaagcctgtacacgaattacatccgacttctccagctgcggacctgcattcatatcgttctttttggaacagtggatcgaaagtgcagtgaagctgactggcatcaaaagggcagatgcctgcgctctggctggcgaaatgctcctgggaacaggcaagttgctcaccgaaggaggatacaccccgcaagagcttcaggctcgtgtcgctgtacctggcggtattaccgctcaggcacttgcactgctgaaggttagtcttgacggcgttttcgacagcctaatccacacgacacatgacaaatatgatgaagatttgttaaagctggatgaactattccgagccggtgagattaaccggcaacaatattaacgagtttgcctggaacggcaatgaccttgcgaatggtcttgccttccagcgcctgcttaacaggtgccagctccatcgtaaagtcctgcataccctgtgcatccagatccttcgcgattgtagcacgagttacaattttaccatttacctgaacaacgatttctacttccgcatccactgtcatggactcatcatattcaggccaagccacgtaagagattccaccttcatgacccaaacggctccacagttcctctgccatatgtggtgccagtggtgacaacagctgcacaaatttctccatcgcttcacgaggcagtgtgtccgctttgtatgcatcgttgatgaaaatcatcagctggctgatggatgtgttgaagcgcagatgttccagatcttccgtaacctttttaatcgttttgtgggcagtccgtttgaactcatccgttccaccgtccaccgtaatcttgtcattgatggctcctgtgtcttcgttaatgaagagacgccatacacgtgacaggaagcggtgcatgccttcaaccccgtttgcattccacggttttgtcgcttccaatggtcccatgaacatctcgtacagacgcaatgtatctgcaccgaattcattcacgatttcatccgggttaatgacattaccacgagatttactcattttctcattattggtacccaggatcataccttggttgaccagtttgtggaaaggctctttggtctccacaacacccagatcatacagcactttgtgccagaaacgagcgtacagcaagtgaagtacggcgtgctctgctccgccaatgtacagatcaactggcagccactgctgctgtttctccttggagatcagttccttgtcattgcgcggatcgataaagcgcaggtaataccagcagctacccgcccattgtggcatggtattggtctcgcgacgtgccttcattcccgtttccggatctaccgtattcacccactccgtaacattcgccagtggtgattctcctgtacccgaaggtttgatctggtcgatatcaggcagcagcagtggaagttgatcctcaggtactgtcttcatcgttccgtcttccagatgcagaatcgggattggctcaccccagtaacgctgacggctgaacagccaatcgcgcagacgataggtcactttcccttgtcctttaccgttctcttccaaccaagcaatcatcttggcaaccgcttcttcattattcagtccgttcaagaaatcggaattcacatgtgcgccatcacccgaatatgcctcttgtgtaacgtctccaccttgaataacctcgatgatatccagaccgaactgcttcgcaaattcccagtcacgcgcatcatgacccggaactgccataaccgcacctgtgccgtaacctgcaagaacgtaatcagcaatccagatcggcagttttgcaccattaacagggttgattgcataagcgccagtgaatacacctgttttgtctttggccaaatctgtacgttccagatcactcttacgagaagcctgctcctgataagcctgaatagcttcacgttggtcatcggttgtaattgcttctaccaattcatgttctggagcaagtactgcaaagctcgcaccgaacaatgtgtccgcacgggtagtgaacaccttgataacttcctcgcgaccctcaatggcaaatacaacttccgcacctgttgatttaccgatccagttgcgctgcatatccttgatgctttcagaccaatccagctcttccaggtcttccaacagacgctctgcatactcggtaattctcagaacccattgacgcatcggtttgcgtacaaccggatgtccaccacgttcactcttgccatcaataacctcttcattagcaagtaccgttccaagggcttcacaccagttaactgcaacttcatccacataagccaagcctttattgtacagctgaataaagatccattgtgtccatttatagtattcaggatccgttgtgctgatctcacgatcccagtcataggagaaaccaagcgatttgatctggcgacggaaattgtcaatattacggaatgtaatatctcgtggatgttcacctgtatccagtgcatgctgctcagcaggcagaccgaaagcatcccaacccattgggtgcaatacgttgtaaccgcgcatacgtttgtaacgggaaacgatatccgttgccgtatatccttccgggtgacctacgtgcagacctgaaccggatggataagggaacatatccagtgcataaaatttcggtttagcagggtcctcacccgttttaaacgttttatttgcatcccaatattgctgccaacttttttccatgacttgtggctgatagccgtgtttcggctggttattctcactcatctattgttcctccttcaggttattcactttagctttaattgcaacaaaaaaacctcagcatcccgtagcgtttgcagcgctagggacgagaggttgaattcccgtggtaccaccctagttagtggacgaacgtgcttcgtcatccactccctttggacctgtaacggcggttaaccgatgcggatttccattcctgaacccaagctttatacaagcgggttaaacagaatggtgtaatcaccgcatttctccaaggcgagttcgcaaatcactgtcaaccggcttgcaccaaccgccggctctctgttatgtacaggaattactactgatccttatcatcgaaatatgtatacaatatcgggaccattatataaaaaagcaagcccaaagtcaatattacacgttataatgacccttttaagtcacacggttcgtaccgttcaataatactcgttgctgttcaggataaccgaaaacgctcaatgccttcctccagattatgaatggtccaattcacatgttcctgattatcatattgacgataagcgcactcaatgcgcagcaccagatcaaagtacaagtcatagagacttcttcttttcagctcactttcagtcgtaatcgcatacccataccctttcacaaaaccaggcgtatagttaaaatgactgaaataatgctccatcagaggatctgcccacagtgaacgttcaaaatcaataatcgctgtgattcgacccgcgtccactagtacattgccatcccacagatcccaactgataagcacaggttctttgacatcgtccagcacatccgatttttcttcaatcaggcgtctcaattcagggtaatcgatcgaaaatgtaatcccggcttcttccccgtcggtaagaatgtcatccatcagattcataaatgcatctttccatgtggaatatcgctgtttttgctccgagaaatatccaaactgctcgcccttgatttcattaattcgacgattgtaccgaccgagctggtgttcaatggcctcctgctcttccgcagaatattgatccttgacctgattatagggcgctccagacatgtactccatgataaaataacgtgctgaagccatagttaacgaatcatcataagccaacacttggggtaggggaacatcctgtagctccgtaatgaggcgtagtacctcaacttcggcaatcatgagatcctgttcacagcgcatcagatttgtcgaagctgacggtgcaattttgagtaccactcgctgtgcgtcactcagtgtaatgagatatgcatgattggcccagccatccaccatttccttgtagtcctgtatacttgcagagaaatgctgctctattatggcattcaactgttctgacgtaagtcttgttttatatgtactttccatttctacacctcacattgacaattgatttattttctcagaaaacgctttctatccgactattatcaccttctttactttaactggcaatactttttgtcacgtcgttatgtcttttcttgcattcctctaccctatttaagactattgctattcattctccataaaaaaatcaaacaaaaaactgccctcatgcaccataaggacagttctcattattcgctcttacttcacagccacgtagaacaagcgctgtgcgctgtctccagcttctttccattcaaaatccgcatataccttcacgtctctaaaacctgccttggacaactcaagcttcatccagtccgggttatatgcacgctggacatgaacttcttcaaaccgctgatacatatccttgctaccatcatccacacgcgaaaaaatactgagatgatgttcgatctcacagcgatcctgatccagatcacatgtccaaatatacgacacggagcgctcatccagtacaaaaggctgctcttcatcataacgaataagggtattgggatgatgcacatcaaacaggaacgttccatcaggcttcagcatctcgtatgtccgctggaatgttcgaacgacatcttcttgttcaagcaaataattgacgcaatcacagaaagatatcaccgaatccacaggttccggaactcgccattcccgcatatcctgctgcacccaacggacactgccctcacgatacaagcgatgaccctgaggcgtagcctccatcttgctgcgtgcaaccgacagcatatctgatgagaggtcaatgcctgtaacttcgaaaccggagttcacgagcgggatcgtaatggagcccgttccacagccaagttcagcgacacttttgggcattccatgcttttcccatgctgttcttgcaaaccttatccagtccggataaggcatatcttccattaattcatcatacacataggcaaatttccggtaagacatgtcaggcaccgcactttcaatttcattttcgaattgatctatataagttgaaccaaagaatatttacactggacactccaatgacagaacaaccttccgatcgctgttatccccagattttttttattccttttataaaggtttaaatccggggataaaggcgaacgctccgcttcttcaggttctttctgtcctctccgtttcgtgtaaatgtttagttcaatttatataacaaaagaaaaagcaggggcatccggtgtttacccagcctatccctgccttatccgagttccatattacaactatttaatcaggaagattacttgttttcactttgatccgcaggagcagattcggacagatacgtccagctttccttttggaccaccaatccgtctttcatcaatttgcccaaggcacgcttgaaagcagacttactgatgccaaagcgctgcttgatgatatccggcggagttgcatccgagtaaggcatgccgcccataggacgctctttcataaaggcgagcagcttgtctgcatcttcgttacgtccaacttgtttgagttgagtcatggccagattcacacgtccgtcttcacgtaccagtgtcacccgacatttcactttctcaccaagacgcaacatatgacttcgttcagatgaatgaatcataccaatcgcgccaaagcccagtacaccaccctctacaagtacaaaagtacccatctgcagtggcttgtataccgtcgcttcaacccactcgtttaaccatgaagttggagcatggaaagacaatggtgaaagctcacgttccccggccaatttggcacgcagacgtccctgcttatcatgttccatgattacaaagacttcatcccccacttgaggacgcaattcttccagttcaggcaattcacgaataggaagtagcaattgccgtccaaggcccatttccaggaaacagcccagtcgtgggtgaacatctgccacaaccagtcgtgccatttcgccaagcatgagataaggctttttcatcgttacggccagacgatcttctgtatcaaagaatacaaatacctcaagcgtctcaccaattttaatatcccgtgttaactcggtgtagtgaagcagtacatcttccgatcctgtcgtcaaaaagaagccaaacggagacacttctcgtgaaaccggcaaagagacgactgttccagcaatcaaactcatacagtttccaccactttggcatcagaccatagtcgttcaatgttgtagtattcacgctcgtcgcggtggaagatatgaacaacaacatcgcccatgtccatcaatacccaacgtgcggaatccataccttcgatacctttgatcgtcgctccggctgcatgagcctgtttgcgaatttcagtggcaatggcttgtacctgtgtatcggaattcccgtgacaaataacaaaataatctgccaccagggaaacattaatcagatccaacgctacaatgttggatgcctttttgtcgtcagcggcagcaaccgccatattcataagttctttcgatgatactgtcatgaaccaacctccataatctataattgtgcaattaagtcattccgcgacagcatggtcaaaggatagatgacacgccgttgcgagatcagcaagctgatcgtcgaatcgaatccggcaattaaaccttcctccagactacgttcagcctgttcgcgaatgtgattcactcccgggaagtctcgtcccggttcaatgtaatcggcaagacataccactttgtccagcaagctcatgcctacccgacccgaggtatgccaccggatggcattaataacttcggaatcttccacaccgtaatcacgcttggctacaaaagcaccgacttcggaatgccagagctgcttgtcatgctgcagaagttcctggtttaacccgttatcgcggatgaccgcttccatctccgctacgggccagtacttcgccacatcatgcaatatcgctgccagatctgctttcacaggatcagcaccgtatttttcagccaacatcactgacgattccattacacccagtgtatgcttccagcgtttttccggcatttgtccggatacggcttgaatcagttcatcacggcttagtgccatataaaccgctccttacaatgtattggtgcacttcatcaggaatcatgaagcgtaccgaatgacctttggccagacgtctgcgtacggctgtcgatgaaatatcgaccaagggcatctcggccagcaggacccgatcctgtaactcgtctggtaaatcatccagatgtaactggaagcccggccgaccaactccgataaaggttaagcgttctgcaagctcttcaatctgctcccatttggggagatagttcaccatatccgccccgataatgaaataaaattcatgttcaggatggcgacgccacagttccttcatcgtatcgatggtataagacactccgcccaattccatctcgatacccagcacctcatattgctgcacacccttcacagccgcttccgtcatatcgagacgttgctgtcccgaagctccggctccgcgtttgtgaggtggaacatgggaaggcatgaaccagatctcatccagtgcatgtgaatcccttgccgcttcagctgccaggaggtgtcccatgtggatcggatcaaacgtaccacccatgatgccgatcttcacctgcgtcacgctcccttatctaggtagttcgatttgtttgttatcgcgagattctttgtacaggatgattgtgttaccgatgagttgtacaagctcacttcccgtttcacgggcaacttcttctgccatctcttttctgtcctcgtcattgttgttcaacacttgcactttcatcaattcgcgcttctcaatcgcatcttcgatgtgacggaacaggtgctcgttggttccacctttaccaatctgaaatacaggggtcaggtgatgtgcctgtgaccgcaaaaagcgcttttgtttaccgtttaacatgaatactccatactccttatgttgagcagaccctgatcgacagcgcaaaaactgtccggacctgaccattcaattattatttttcaatggtaaaaatgatcactgagtacacaaggtgactccgagtgcagtaccatcttccgatcgctgttatccccagatttttctgattccttttcacaaagggaaaatccggtgataaatgcgaccacttcgtttcttcagattggttctgcactcgtcgtctgcctgtactcttaatatcattttcacacttcaaaactgtttagtaccgctcgtctcattgtctccacaggagcgggaatgccgagccaatgttcaaaggccactgcgccctggtatacaaacatacccaaaccaccgtgcaccgtgcatcctcgcatccgcgactctcgaagcagacgggtctccagcggattgtagatcagatcactcaccgctgctccttcacggatcagtgcaggatcaactggtacgtcatccacatgaggatgcattccggcagccgttgtgttaatcacgatatcagccgtagccagtaccgttgcagcgtcttccatgccactgcccgagatttctcccaagccatggcctcgtaaatccgaagcaagtgcaatagctctgtccgctgtacggttcagaatgtggatgcgttcaggcttctccaatgcaagtgcatatatgacacctctcgctgctccacctgcgcccagtacagcaatacgtttacccgcaagctcaggcacagcctcttccttcaacgatcggacataaccaataccatccgtattgtaccctgtcagtgttccaccttcattaacgatggtattcaccgcaccaatcaggcgagcactttcatcgatcacatcgagatactgcatcacctgctctttgtgcgggatggtcacattaacaccacgatagcccagtgccacaattccgcgaactgccgcttccagttgatccggatgaacatgcagtggcatatacattccattcactcctgcagcctgcagagccgcattgtgcattgccggagacttggagtgagcaataggatcacccataacaccaagcaacacgggaagtgaagagttgaatttgttctgctcagacataggtccgcctccgatccatctgatgtacagcttctgagattactagatcaaggatgggcggatctgtacacgaatgccttttggagcatgaacagcaacaagcgctccaatatcgccattaaccttaatccagcccagacccgagatgaatacatccgattgactgccgcgtttgatgcggaattcatgtctggtccattcagccatctctgctgcatcctcacgggttggcggagacaacaattctcccagatggtcgcggtacagatcatctgcacgctccagcttcgtccggtgaatatcaagcgcagtgctgataaaacaagtgaacgactggcgatcaccttccacaaagtcaaatcgagccatgccgccaaagaacagcgtctgaccggaattcaactgatacacagcgggtttaagcggtttttccggcatgatggcagcgagatccttacgtgaaacaatctcgctgaaacgccatggatacacgattccaggcgtatcaatgatatattttccatcatccaacggaatgttcaccatgtccagcgttgttcccggataacgggatgtggtcagttcctgctccagatcgctgtaatcacggatcagacggttaatcagtgtggatttgcccacattggtgccgccaaccacatatacgtcacgatcttcgcgatacgttccaacaagctcaagcagacggtcgaagccctgattttgctttgcactgcacaagactacatccacggtacgcaaaccctgttctttggcttgcttttgtacccagttgcgaatcttgttccagttagttactttcggaagcaagtccgttttgttcacagcaagcaataccggattgttgcctacaaaacgttgcagaccggagataatactgccatcaaagtcaaacaaatcaacgatatggatgacaagtgcatctttatccccgattttgctaagcagcgccaggaattcgtcctgatccaccgtaacggatgatgactcattgtagtttttgatgcggaaacagcgctggcatataaccggttcacgatccaatgccttctcggggataaaccctggtaattccgaattttctgtttgcagatgcacgccgcatccgctgcaccttacggcaagattgccgttatgcggttctgtcatttcttcttttcctcctcaagccataagcctttcctgcgtaaactcgttagagcaatccgttccacgcgtcgattgaagcgggtcataaaaccttcgtccccaatggagattggcagtaccagaacggtatataaccccattcggttccctccataaacgtctgtaagcatctgatcgcctactacaatcgtgttttcaggagataactccatcattttcattgctctacgaaacggtacattcgatggtttgcgtgcactatgcacaaactggatatccagcggggtcgcaaacagggatacacgattcaaattgttattggacacaatcatcagcttgaaacctgcctctttcacacgtgcaaaccattcaatcagttcgggcgtagcgtcaggggctttggctccaacgagtgtgttatccagatcagttataattccacggtagccttgagcgtacagctcttccagattaatgtcaaaaaccgtgtctacacgcagcttgggcattaacattttaaacaaagaagtcacctcagtttcatacgacacactatatcacaaatccgtctttcctgaaaatgcatacagcgcctgatggcataggaaaaaaggaaaaacgggacgggcaacaactatgcccgttccgctttcagttccttccgcagcttcaaggcggtctgatagacgcccttccagtcgtcggcagttacggacgccggactgtaacgagtctgttcaaacttcgtgagaagctcataaaatgttgcttctgcagcaggttttgcctggctccagcgggctaccgattcacgaagtgtctcgtctccgctccgggtcaaccctttgcgtttcacatactgaatccaacgctcggtctctgccactaccttctgttcaggggtgagcggtccacctgtccgtagacgaagcaggaagaatcgcatggagaaacgattacgccagaacatgtatgctacccacaatactataatggctcctgcagcccagataacaaaagttgggatggcagacgaagtctgctcaggtgcaggggtctgctcttcctcttgtaccggctcctcttctggctcttcttcaggctcatctacaggttgtacatcaggctgttccgtcagcagcggcatatcaaagcccggcgttgcttcaacaggaatccagccatactcaccaaaataaacctctgcccaggagtgtgcatctgcattggtaacggtgtaggtcgtctcaatctccgcaccaggttgacgtggggcctgcatgtccgaattcagggacaattgtccaggcgcataacctttaacccaccttgcaggaatgccctccgagcgcgccatcatcaccagcgcagtggagaaatagtcacagtagccttccataatatcaaacaggaaaccttccacaaagtcgttgcttacttttcgagataaatccggattgtttgtgtattcaaaattagtttgtaaatagttttgcagtaatgccactttttcatacggagtattcgcagatgccgttatctcggctgccagattcgacacccggtcagggaaacgggatggtaactgcaagtacatatcatctgccggattactgttatacagatcttcaaatgacttcgtacggagctcatcttccacaatcacaggggcttccgatacgatagtatacgtcttgggatactgtggttgctgacggtctgtcaccacatgcagttcagcctgttcagcattccacaacatccgttccgttctgtcctcaccattaattgagctcacttccgagatcgaataagcaccaaagagaatcggatagacattatcattcagcatcgttacattctgagtcacttgtttggtattcacattaccggattcttggttctccagaggctgtccggcttgaacattctctgtcgtaccccgtccacggtcatcccaacctgtgcctgtatactctgcacgtgtctcaccgcgccagtaactacgctcattggtcgtgacagacatgacaggggtatagtcgaagttgaatcctccaccaagctgattgtcttccctgctgtatcccgattcggtagccgcgggaatatcaaggtttccgttaccagcctgacttgtggaagttccggtatagttacgccatgccgtatatgggtccgtcaaggtggggggaatctcaggcatattaacgctggctacaataatcaaagaaaagataatggcaatattggccaggactttataaggataccggatgattcgtttccaaccttgtggatactgtagctgatagttacggaaatgctgacatacgagccatcccatccccgcaaacatcacccacgcgatttcaatccagagtggaatctgagtgaaagaatcgagaatccccatcgaaatgatgttaacacccaaaaaaacaagaatgcgacgtgtggtggtcacgagtcgaagcgcagcttcaagcatcacccatgcacacagggagaaccagatgtacggcgtcatgtgtaatatgaattgctccgctcggtccgttaaagagccataagggatgtataccgtataatcaattagcgttttatgcaaaatgtaaccaacaacgaccgccttgatgatcgcccgatagatcgttttgaagggcagaatgacctccagcacactgaccgctgcaagtgtccataacaccagagaagttgtctccgtgtaccacgattcctgcgtaaatgaaatccactgcattccaatcaggaaaatccagagcaatgacgctgcatgataccaggatcgtttgcctgtaacactttcatttccttttgtactcataaagaacctccccccatcaccgttggaagctcctgcaagtgagaaacagtgaatgacctcgtgcctcttccacgcaacatggcattccactcggcactccggcgggattcactggtatcgatcagaatatgacatggcgtcatgccccgcgtatcggcccagcgcaacagttccattattttttcatccttctggggagaaatcacgacaaagtaagctccctgaggcagttgacgtgcaattctttccacgccgggcaacagatgggtatcctgaccgttatattgaatatccaccagatgatgcatcatcttctgtcgttccatcagactttcactgggggccatgaaggatgtctggtctgacaatgtcaacaaccccatccccattcgttccctgacaccatactccagcagagaggcagccgtggaaacggcaatttcaaatgcatccccatgttcataacttgatgccagcgcatccaaaaccagaacggttttgggcacagactcatgttcaaactccttggacttccagttccctgtctttgccgttgcattccagtgaatgcgggaaagtcgatctccgtatacgtagtcacgtacaccattgatctgagtggtctctctccgtgagcgggttaacgccgtctgaggaccggataaccgtgatttgcggtcgtaaagctgccaatatggaataaataccgttcttggcagtacgcgaaactcacctttggccttaaactttcctcgatgttcaatcagtccaaatatgtcctcgctggcacattccgtttctgaaaaaacatacttcccccgctcaagtggtggcgtctggaatgacagctccccattacctcgcatattgggaatcaaactttccttgaacgaccacgattctccgttatgccgatgcagcatttcacgcacaacaacatagggaagcgggaggaatcccggaatcgtcagactcagctgtacttgaacctggtcacccgcatgcagcaattcttcgtggtctggaccagaagataacctacgaactccttgagcacgtcttaccccgctaaatccagcaatggcaaggtacacacagagcagggtcaccatcgacagcaacataagggatgtcttcccgccctgaaacaaaacataagccagacagcacatccacaccattgcgatgctccatacgcgtgggtggcgtaaccctctattgactgttctcaaaagcggcttcatgaactattgccccatggagacgggcacgcgtacttgctggagtacggcattcaaaacggcctcggaactcatactgtccagtctcgattcaggacgaagcacaatacgatgagagatcacataaggggccatcgttttcacatcatccggaagcacataatcacgttcctgtaagaaagcaaaggcttttacggccatcatgaacgatatggctgcccgtgggctggcacccagcaatacagatgggtgggagcgggtttgacgaacaacatcaagcagatagtccatgaccggatcaccgataaagacctctttaatctcctgctgaattgccgagatctggtccatatgagtcacggattcaagacgatcaacaggctgaccgagctgatgctgtttcaataggattttctcaatttccttatcgggataacccagacttattttcaacataaaccggtcgagttgtgcttccggcaaagtatacgtaccttcaaaatcaatcggattctgagttgcacagagcatgaaaggatgtggcagatcatacgtatcgccatcaacggttacgctgcgctcctccatcacttcgagcagagccgattgagtttttgttgtggcccggttaatctcatcagctagcaaaatgttggtcatcacaggacctggccggaaataaaaacgctcatccttcggatggaacacagatacgcccgtaatatcactaggtaaaatatcaggattacattgaatacgccggtactcaccacgcatggatttcgataatgccttgattaactgcgttttgccagttcccggtacgtcttcaatcagaacgtgcccgcctgcaagcaaagctgtaagtaaaagttgaatttcaaaggatttccccataatacaggattccagattagaacgaactgcggatatgatttggatcgactctttgcgcacaggcatgtggtctaacctcctaaaaaagcatacagatttccttttattgtacatgatccagagtcacgagtacactcgaaggacctcacaatttgtttccagcccgtcagattcaccgcagttctcgcatgaatacgacaaaaaaggcccggatagaagttatccgaagcctctgttgaatcgcaatatgttcaagtagatttctcattctatgttagccttttggtctaacgaccaatgccgcgagaaaagaaaagatgatcgctgacgaaatccccgccgcagtcaggtcaaaaatccctgtaatcacacccagccatccctctttttcaagctccgtcaatgccccgtgcaccaaggaattaccgaaacttgtgatggggatggtagcacccgcacctgcaaatttaaccaaggggtcatacacgccaaatgcatccgcaagcgcacccgtcacaacaagtgtactcatggtatgagctggcgtcagtttaaccccatccattagaagctgtccgacaacacagatcaaaccgccaacaataaatgcccacaagaactgcattacctttatccctccttttctatggctacggcatgtgcaatacaaggaatactttcaccctgctggtacgaaatcggagataacagcgccccggtagcaacaacgagcacccgtttaagatcacccttctgcatccggttcaaaatgtgaccataggtgacggtggcagaacatccgcagccacttcccccggcaaccacataaggctgtttctcccgatcatagatcatcaggccgcaatcattaaataccgtctgttccatgggaatgccttctttttgcaaaagctctttcgtaattggcagaccgacggaagccagatccccggtcacaatgagatcataatagccgggttccaatcccgtatccctgaaatgagagattatagtgtcggctgctgctggcgccatggctgaacccatattaaagggatctttgatgcccaaatccataatgcgtccaatagttgctttggtaacaacggggccatcaccagtacgggagaccacaccacaccctgctcctgtgacggtatattgcgcataaggcggcttttgggagccatactccgtcggataccgaaattgtttctccaccgtacaattgtggctcaccgttcctgcaaggacataatcgccagctccggagtcaacaatcatggacgctaacgctaacgtttccatggaagtagaacaggccccaaagacacccaggtaaggcacacccagttttcgcgctgaaaaggaactgctgataatctggttcatcagatctccaccaacaaaaaattgaagctcttccttggtgatatttgcattaaccaaagccagttgggaggcctgttcgagcagtttgcgttctcccttttcccacgttttctcgccgatctcgaggttgtcgtagacataatcgaaatcagatgacagtgggccctcgccttcttctggtcctacaactgcggatttaccaatgatccgaggacgattctcaaactgccatgtctggcgacccaatcgtttcacaggtgcccacctccaaatcccaaaaaggcgtaaacgatccctacgacaaatgctgccacgacaccaaacacgataacggaaccagcaagtttaaacatgttggcccctacaccgagcaccagtccttcagcacgatgttccagtgcagcagaacacatggaattggcaaagccggtaaccggcacagcagttcctgctcctgcccattgagccattttatcgtaaacgccgagacacgttagaataaccgatatgagaatcatgaccgctaccgtaggactggaagcttccttcgatgtcatgtcgaaaccggccataaaagcctcttgaatggcctgtccaatcaaacagacggtacccccaaccagaaatgctttgaggcaatttttcaggattggacgaggcggctcatgtttttttgcgacttttttgtactccttttcatccatggacagggacgacgattttttttcgcttccggatgcagattgagctggcaatatacaagacctcctctatgtgaaaatggttcaaagctacggctgaatgccaatgtgtgtaatcctatattcattgtttgttaataatcggaaggttatgtatccggcgacagacagcatatgtttccaacaagattatgttgtgaaagcaaagtgggaatacgccggatctgaggacttttagatagtctataaataaagaagaacaatcacgagcaagataaaaagaacgataaacagtactttttccgtgccctcttctggaggcttcattggatatttagctccttcctgtagacagacaaacaaatattgaaataagaacttcacaaaatgatgacatctcctccatatattcatattcattgaagtggtatcaggactacgactacagcggatagagtcatgaaacttggacacggtaagtgcccaaaatatgccttaaatacgtgacataaacatggacaatcacttgcgcaaggttcatactgtaatgtgaccagtggttaaataacaagtcctcagcatattaaagtgcgtgttcaaaaagataaaagactttttgaactacatcttaaaggacaacaggcgggtagccgttctactgtgacctgaaatacataccaacagaggagttgttgacacatgaatgaaaaaacgatggatatgtttcgtacgttgacggaatttccttcagcatccggttttgaacgtgagcttcgcggctggatgaaagataagctttccgcttataccgatgagttcgtccaggatcgcctggggagtctatttggtgtattacgcggggaggaatccggtcctaaagttatggtagccggacactttgacgaagtaggtttcatgactactggcattaccgaaacaggtatgatcaagttccgtccactgggtggatggtggagtcaggctgtactgtctcaacgattggaaatcatcacacctgatcgtcggattaccggagttgtaggttctacacctgcacacttgctggacgaatcccagcggaacaaacctgtggatctgaattccatgtatctcgatattggagcagacaaccgtgcggaagcagaatcctggggcattcatccagggatgcagatcgtgccgatctgtgaatttacgcctatggcgaacccgaaaaaaattatggccaaagcgtgggataatcgttacggcgtaggacttgcacttgaactggttgaagcgctgcacaaggaaaaactgcctaacacgctttatgctggtgcaacggttcaggaagagctggggcttcgcggtgcacgtacggcggccaatctgattcagcctgatatcttctttgcactggactgtagcgcggcgaatgatatgacaggtgacaaacagtcatttggacatatcggagaaggcgcattgcttcgtatttttgacccgggtatgttcacccatcgcggaatggtggaatatgttcaagatacggcttcatccaatcaggttaaaatgcagtatttcatctcaccaggtggtaccgatgcaggtcaagttcacctgagtggcattggtgtaccatcaatagttgttggtatctgcgcacgttatatccatacctcttcttccatcattcatacggatgactacgatgcggccaaagaactgatcgtgaaactggtcaaaggtcttgatcggacaacgatgaataccataattaataacgcgtagtaaaggttaaacggaaagtccttaaataggatgtacctgaaagagatgtcccgtcagaccgggatgtctctttttttgtaatcaactagattaataggtcgaacattatggagaatgccacataagatatacgataatggaagatcaataaccaaacaccaaccagtgggggacctgttatggcagtgggaaggaacggaaaatcaaataaaggttctaacaaaaaaccaaacgctgctaacaccctccttaatggaagcctcaaagggaaaaatctcgaactgattgtagcggcgctattggtgagcggaaagttgagagtggatgccgtcacgttgtttcgtgaggctacattggttgtagaattggttggtcaatataaaacacttcaaaaggtcacaccctccaattcagacaaactggtacaattcctggatgaaactggcggcgatatgacgcttaatgatgttatacaggcatttcagcagaggatcaattcttaatggccaagaaatgaggtggacatcatgtccgagtttgatggaaccgggtttgccgaactgttaattgtgcttattcttgttgttttatttgtatttggctcctccgatattgaaagtttatccagcactccaacagcgacttgatctcataaccctcttctcatggcttacaggtaaaataagataagagaaataccagtccttatgtaggactggtatttggtcattacagaaataatggcgagaacgcgaaccacgccaaaatgagtgtgagcacaatgcagacattctctacaacggccccacgcttggtccctgtactcatcagattcacccgtatgcgccacttgagcggtggtaacggacgaataccccgattggtgagtgaatcggccaacagatgcatcgcatatgccgtgcctcccgctacccagatctccgggccctgctgctgggtcgtgctgtagagtaaaccagcccataccgcagttccatataaggtatgcgttaatcccctatgagttagcgtggtgcacagcataagcaggctgcctgcaatcagattccacggtgcaaatgcgtgaccatagaaaaccagtccgagtccaatcgcaaacatcaacactttgcgaagcgaacgcgaaggcaggaatgacacaagcgcaatgaggatcgcaagcaacaggttccatggtttggcatgaacatagaagtacacaaatacagctgtgggcaacagaatcgtctgtaacaacctgatcagactgttaggcaaggctctggataccagcagcgaatttggctcatcaatgtcaggcaataacgaaccaatcagagcaaccgtaactgccggtgcagtcaccggcataccggccaactgcagaacagaaagcgacacgcctgtcccgataataaggtgggatcttcccatcatgatgcaaaaacgtcctttcgaagaaatcgggaacaatacggcccagttccgattttacaatgaaaacaaaataagaacaatagttcgcatttcttatttgtatgaaaataaatataactttctgtgatagggctcacactattatatttatgactcttctatctttattagtgaattaaatcacataaactgtcgtcaactacttgtataatttcaaatataaaccactaaaattgttggtaatgtacagcgtctatccaaggaggcatacacacatgaacggaaaaaaagagaaactcgttatcataggtaacggaatggcaggaatcagtaccgtagaacaaattttgaaattaacatcgcgatttgatattactgtttttggcacagagccctaccctaactacaaccgcattatgttgtcctatgtattggaaggaagcaaaacactggatgacatcgtgctgaacgaccttcactggtatgaagattacggcattacattgcacacaggcacaacggttacacgaatcgatgccgagacacacgaagttgtgactgaagatggaactcgcgttccttatgacaaaatcatcattgcgactggctccaactccttcattctccctgtaccaggacatgacaaagaaggtgttgtcggtttccgcgatatcgccgattgcaatgtcatgctggaagctgctaagcagtataaacgagcggccgttatcgggggcggactgctaggccttgaagctgccaaaggattggtacaacttggcatggaagttaccgtagtgcatctgatggaagatctgatggagcgtcagcttgatccacaagcttcagccatgttgaaggcggaactcgaacgtcagggtatccgcttcaaaatgggtgcgcagacctccgaactactgggcggcgaacgcgttgaagggatacgttttgcagatgatacggttctgaatgttgattttgttgtcatggctgtagggattaaacctaatacggtcgtagctcgggaaagcggtatggaagtcaaccggggcattgtcgtgaatgactatatgcagacttcacttgagaatgtgtactcggtcggggaatgtacagagcaccgcggggtatgttacggcctcgttgccccattgtttgaacaaggtatgattctggcgaaacatatctgcggtgtggagaccgctccttatgaaggttcagttgtatccacgaaattgaaaatttcgggtgtagatgtcttttcaaccggtgaattcatcgacagtccagagcacaccgtcatttcgcacaaagatgactggaaacggacttacaaaaaaattctgcttcgtgataataaaatggtcggcgctgttcttttcggtgacattacggattctgccgaattgcagaaactgattaaaaatcaaaccgaaatgaccgaggaattgtacggttcactcatgggtacaggctgcggcggtcataagaaagcaacttctgttgaaacgatgcccgaggacgaaatcgtctgtggatgtaacggggtaaccaaaggagccattgttgatgtaattacaaaccagggccttaccactgttgatgaaatcaaagcctgtaccggtgcaacacgctcttgcggtgggtgtaaaccggttgtggaacagattctgcaatatgtacttggagacagtttcagtactggagccaaacagggcatctgcggatgtacttccatgggtcgagatgaaatcgtagccgagattcgtgaaaaaggattacaaacgaccaaagaggtcatgaatgtactgggttggagtcagccagaaggttgttccaaatgtcgtccggcgatcaactattaccttggcatgattgcaccagacacacacgaagatgagaaagaatcccgttttgttaacgaacgtatgaacgcgaatattcaaaaagatggaacgtatacggttgtacctcggatgtatggcggtgtaactacaccggcagacctcaaacgcatcgctgacgtttcggtcaaatatgatgtgaaagcagtcaaagtgactggcggtcagcgtctcgacttgattggtgtcaaaaaagaagatctgaccaaagtctgggctgaactggatatgccttcaggttatgcatacgccaaatcgctgcgtacggtcaaaacatgtgtcggctcccaattctgccgcttcggtacacaggattccatggccatgggtgctcgcatcgaacgtaaattcgaacgtctggatctgccagccaagtttaaatatgccgtcaacggttgtccgcgaaactgtgcagaggcatgtaccaaagatatcggtatcgttggtaacgacggaggctgggagatcttcatcggtggtaacggcggtattaaagcaagactggctgattccttatgcaaagtgaaaacggatgaagagttgattgaactgtgcggcgccatcatgcaatattaccgcgagacaggtaactatctggaacggacgtccgagtgggtggaacgcatgggtctggagcatattcgttcggttgttgtggataaccttgaggaacgtaaagcgttgatgcagcggattgaatttgcacttgagcatgttgaagaaccttggcaaaaagcgattcgcaatgaagaaggccaaagtaaaatgttccatggcatcgaagtatcagctcgtccataagtaagcttgcagattaatactgccggaatgttaaatatagataaggagtggtttaagatgacgacaaaacaatcaggcacctacttccctgccggagtagttgaagaattcctgccacgaatcggaagagtagttgagattaaggatcatcagcttgctgtctttcttgcatcggatggtaccatcttcgctgcggataatcacaacccccatcctaagggtgggccgctggctgaaggcatcgtgtccgggcattatctgtacgatccgctgtatgattggaaaattgacctgactacaggtcttgtgcaagcaccggacaacggtcaagtacagatgtatccggtaaaggtagagaacggccaggtttggatcgaaatatagcgaaacgttcaaagattgatgcaaaataatgggggaaaccgtgatgtatacaccaagtgttgagggaattattgaagctgcggttaaaaaacgggatcaaatgaacgcaagcctgtcacgatatatggttgctgccttgatggctggtgcctatgtagggcttggcatcgttctgatcttcagtattggtgctccgctcctagcggcacagtcaccactgcaaaccatgttgatgggcatgtccttcggactcgcgctcacgctggtcatctttgccggatcggaactgtttacaggtaacaatatgttctttaccatgagtacactggcaggccgaaccacagtgaatgaaacgctgaagaactgggggctcgtctttgttggtaacctgctcggcgcaattctattaagtctactcattgtcggtagcggcctgttcaaaacggccacaccggaacatctgttattcgttgtctctgccaaaaagatggcggcgcccgtgtctgagttgttcttccgaggcattctctgtaactggctcgtctgtctggcgatctggatggcagctcgctccaaagaagatatcgccaaacttgttctcatctggtggtgtctgtacgcatttatcgcaagtggttatgagcacagtgttgccaatatgactttgctctctttatcctggctgctgccaaaccacccggatacaatcacgatggcaggctggttccataacatgattccggtaacgcttggtaatattatcggcggtgccctctttgttggaatggcgtactggtatacttctccggtacgaaaaagagcataattcttgattcaactgcacttatgtagcctagagcacaacatctacacacactgaagccacgatggatgccgaactcacgttcagtcacacatcgtggctttttattgtttgtcgataagctgttactctctcgtacgcttcccattcatcctctcgtccttctatagagaattaaaacttcattttaccttcgtcgctatccgcgttaatccacagttgacataactggcgtatagtcgatggatactcacacttatactcaaccagcaaaggatgaacgcttatatgggaattcacacgtacttcaggtcactaaacgatcttgaacgtattattcgtacacctggcaaattcaaattcgaagaacatagcgtatccgctcattcctggaaagtggtacagtacgccaaaacgctcgcagatattgaggagcaacatggaaccaccatcgattggaagaagttatacgaaattacgagcagtcatgattatggcgaaatcttcatcggtgatatcaaaacacccgtcaaacattattcactggagctgcgttcgatgctgcaaaaggtggaagaaggcatggttgaacattttattaatgaaaatattcctgaagagttccagcctattttccgcagacagctgcgtgagggcaaagaccaatcggttgaaggactgattctcgaagtcgcagacaagatggatcaggtatatgaagcctttgctgagctccaacgtggcaatacggagaaagaatttatcgttatgtaccgttatgcgttggtcaaaatcaaaaatatcgacctccactgtgtgcagtatttcctggaacagattctccccgacatgatcgaagaaggtatccgctccccgtttgatattcgcaaaataaccgaagaagctctggcccagtaatcagctcaagtcaacatggtgctcatcatccatggacagggctttttttcgttcctgcaattgcagtcggtactcgctagggtacatgcccgttttgtttttgaagatccggctgaaatagtgggaatcactataccctaccgctccaccaatagtcttgatatccatattctcgtgcgtgacgagcatacgttttgcttcattaatccgcagacctgtcatatattttagcggagtctcacccgttactttcttaaaacacttccccagatagtccacactaaaatgcatctgtcccgccatgtcctggagtgtaatctcatgcatgtaattctgcttcaaatacaacttaacagcctctacgatatcctccggcttcacctgctcatccagcacggcactgacatgcgcaagcgaatccacagcgctcccaagcttcaattccatcgcatccagcagtgtacgaagctgttcttccgataatggtttgagcagataatcctccaccttgtaactgatcgcctgccgtgcatattcgaattcatgataaccactcagaatgacaattttcacatgcggataggcaaaatacagatgtttggcgagttccaatccgttcatcaccggcatctgaatatcggttacaaccagatcaggtacggaatgttcaatgagctgtaacgcttcctgaccgttccgcgcttcaccgatcacctcgaaccgggtgtccaactctctgaatttgcgcgagacattccggcgaatcagggcttcatcttccacaataatcgttctatatttaattgtcacgggttcggtcatgctcctttcgaatggaaccacctattgtaatctggacaccgccggaaggcttgttcgtaatctgcatgtgggctgccgtgccataccataatttcaatcggacccatatattcttgagtcccatgccgttgatttcgaggtcaggcatacgctcccactcctgtgactgttcgatgtaatgcatgatcttggcaagtgcctcgggttccatgccaggtccgttgtcttccacgtggatctgccaggtctgctgtgccgcatccatatctccagtaatattcagtttccatggcggggtatcacccagtccatatttcatggcattttcgagtagtggttgtaccatcagcatcggaacctggatatacttcatctcttccggaatatgaaacccgtagtgtagatcatcctcaaacctaatcttcatacactccagatatcgctcacaataatccaattcttgagacaggggaaccccattctttcccggagtagaaatataacgcagcatagacgcaatattggcgcagaacgcgacaatctgctcattcatgccctcttccgccatgatgctaatattagtgatgttgttatagagaaaatgcgggttcatctgggattgcagcgccagtaatctcgcttctgtctcctgagatttcatcgccagcctgtcctgaaacgattgcacaagctgttgattcagacggataaacgtatcattcagctcatccatctcccggatagaaccgggatgctccagcttgaacaactgaccggattcctgtcccgataccagatcattctcacccgttttctgaataatgcgctgcaaacgatgtagcggcaaagtaacccgtttggagatcagatacgagagaaccagaatcagcatgagagttgctaacgtcgcaccgataaacatcacagccatccggttgagactcgcgaaaagggactgtttggactgcatgacaataacggtccatcccgtctcctgtgacgtcatgtacgtcatcatttgtttggactgactcaaaggatcggtgatctcctgcatcgtatcaggcgtaaatgaaagattttgaatcaagtccacatcatcgaaatggcctgcttgagaagcatcggcatccgaagaaagtggatacaaccgtgtattttgttcatccactacatagatccgaagatcgtcgttatttgtctgcaaatcattcaaatgctggaacagggttccggcatcctgcaaaatctcaacgacaccctggctgacatagttgccatctttgtatacccgggtaagggaaatgtaaggttgatccgatttcccctcgccggtcggcatgggcaaagctccgccctctaacagttgaattacccgccatccactccgctcccaggtttccttgtaccacggtcgctgagtcaggtctaccgacagttgaccgttgaatgcacccgctcccaacatcttgccattcacatcatagatattggcctgcttggctgtattggagctgctgatgatcgcaagaatgacatcaattagtgtggttgtatccttatacaatgctggatcactcgtcattgtctgctcactgccttctgctggtgccaagtagtgactgaagtgttctttgaccagattggagtacacgatattcatggaaaagttgttcattttcaccacttcctgatccaggttactgacgattgatacacccagttgtctctgctgttcttcacttcgctgacgaatgtcacttgcgagaaaaacatacagaagccccgccacaatcagcgaaaagataataaataccgcagagtaataggcaaacagactttgctgaagcgttccaaatcgatatcgcaattccctcacacctcgtcctatgatgatatctgtcacaccattcgaaaatgtccacccaacagaacgcttttgtctattgagcacatcccttgttcacagtaaagttatccacataagaatacgcttacataaagcgtttcggcaagtgacaattttctttatattccgggaggttcaatgatgagaaaacgatttctattttcgcttgtaagtgtgctcctgctctccactctgctgcttgccgggtgcaactcaggtaaaagtacggaaggttcgggtaaggtgactctcacgtttggaacaagtcaatccggtattccgcgtacaggcatcatgcagacgatggccaaggaatatgagcaggagacgggtgtcaaaattgacttccaggtcgtccctgacgcacagtggcgtgacctgatcaaggtgaagctcgcttctggcgaagcacctgatatttttaatgtcgatgtggacccactgagcatgccggccaacgtaagaccggaggaaaatgccattgacctgaccaatgaggaattcacaggtcggatgtctgaagagattttgccaactgtcagtcacaatgacaaagtgtatggggtttcttttgcaccaacgaaaatctggtatgtgtactataacaaacgtatcttccaagagctcggcatagagcctcctacatcctatgccgaattcaaggctatcagccagaaaattaaggataaagacattattccgttctatcaggcacctgccagcgggtggtatcaggttctgcctttgttcgaaacgggacctaactatgagcaaacaacagcgggaacctacgagaaattaaacaacaatgagatgaaagtcgcagatatgacacagcttaagacggtcattgaacagttaaaagaatttgcggatctcggttatttcggcaaagacttcttgtccaatacggtagaagcgggaattgaggcgtttggtcaggagaaagcagcgatgttgctgcgggttccagggacggaaaaggaagtgtccgaagcgtatccggcaatggaagacaatatgggattcttcgtcatgccatggggagataatcagacgattggtgtgaacccgggcggatcggctgcgatgtttggtaacaaaaacagtaaacatcccgaagaagtgctgaaattcttccgctggattacccagcatgatcatctgcagcgtgtgttcgatgaaggtgaaggtaacctgacgatctgctggccggaaatcgaaccaaagctgacacaggactacatcgactatgagaaagatcatgaaaaaggtacggttatgcaggccgctgtaaaatacattgatccacaatggatggatattggcaaggacttgtcaggtatgttcgccggagcaatgacaccggatcagattttgcaaaatattgataaacgtcgtgctgaacaagccaaagtgttgaaagatgagaagtggcagtaacagcacatatttcagataaatataaacgctgaacaacgttatatgcagcgggcatttgcccgctcatgtattttggcaggaaggaaaggtgttacggattatgaatgcaaacaaaatctatccctggtatttctcatctggagcaattgtgttatatctactgttcattgtcgctcccgccctgctgggcatctattattccttcaccgactggaacagttatagttcggagaagaactttattggtctggagcatttccgtactattctggcgggtgatccgacctatctgctttttatcaaaaacacagtcctgttcaccctcgttacatccatcgccaagacggttctgggcctgttcctggctctactgttggtcagcggtgtaaaggccgccaatctgcaccggatgatcattttctccccgcaggtgctatcgttcctgattgttgggcttgttttcaaaagtctgctcgacccaaacaacgggttcgttaacgtaactctgcgttccatgggactagacgttctcgcccagaactggctgggctccctgacctgggccatgccatccattatggcagtggatacgtggaaaggcatggggtacatcatggtgctgttcatcgccggactgctcgcgattccacgtgattattacgaagcagcatccattgatggcgccgggttcgggcagaagcttttccgaattacgattccgatgctgatgcctaccattaccatcgccacggtgcttaatattacatatgggctgagagttttcgatgccgtatacgtgttaaccaatggtggccccggtaacgcgacagatgtgattaacacggcggtctattcctcttttgccaaagggtattggggactggggagtgcgctatctaccattctgtttgtcatcatggcaatcatctcctttttcatcattcgtttgatgaaccgaaaggtggaatactgacatgcgattgagaaaaagactcgcttccatcgggttaaatgcactcgcctggctgcttagcctggtggtcttgattccttttgtcgtcattgtactgaattcattcaagtcggacgccgaggccaaagtgcttaaactgacgttgcccgaaaagtttattttcgaaaattacaaaatcgtctatgaacagggacatttaggcggttcctttttcaacagtctgctgcattccggggcttcttccctgctactggtgtttgttgtggccttctcggccttcacgttatcacgcaaccattcgaggctcagcaagtttctgtacttcttcctgattcttggtatcacactgccgctcaactacattccgctgatggaagtgatgaagtccatgggtatgatcaattcacatgtcggcatgattttgctctacaccgccatggggattccgatatcgctgttcattacgtatgcgtttgtgtctaacatcccgaaggagctggatgaagccgcgatcatggacggatgtaatgggatcaagctgttcctgcgaatcattgtacctttgttaacctcggtgctggtaacggtatttgttcttaatttcctgagtgtctggaatgagtttactgccccactctatatgctgaatacagtggagatgtggccgatgacgctggctgtatataacttctttggacaattcagtgcccagtggaatctggtcagtgccgatatcgtgctcacgtcattgcctgtgttaattgtgttcctcattgggcaaaagtatattgtaggaggactaacttcaggggcggttaaagggtaagctccaccgacaatccaaatacacaaacactcttgtctaagtacatcttctgactcctcagcacaaaaaagcccttgtctgctcatcgtgtgaataacttcttcgtacagaagaagtatcacacgttgctgcggacaagggcttacgctgttggattcgaattaatcgtgcgccaacccgccaacatcggatggagccgctatatctgggctctgctccagagatttgatcattttcaaacgggatgtgattattgcgatcagaataacaaacagacccgcgatgataaacagaaaggcaatacctctgcctggcccagttccaataatttgaccaacagacgaagccagtgctcccccctccatcagtaacggattaaacacatggtcggccagaaaaccagccaaactgtacgcgataataaacccgagttgtgacagaataccaatgattccccataccctgccctgcttatcgttggcgatattgtttcgcaccagtacatctgcgctcatattgacaaacggcagtgatgacaggaacagaaaacctgcgaagataataaaataaatgttggtggatatgcccagaagtgaaaaggacaaaccgcacaaaatcagacccatcacaagcacacttgcgtatctctttgttattgtaaatatgccgatgcacaagctgctaatcagcatgccgatggcactaacagactgaaacgttccaagtgtctttgcatccgtgaatgacagaagcatcggaccaatgagtgtctccaggaatcccagataaaaggtgacaagtgaaataatcaccaccagcaacagtactcccttgttggttacaacttctctccagccctcttgaatatcggtgatccagttttttccttctcgatcctctcgctccaccttcatgctcttccgaataaccagcacagccagaatggcaaccaggaatgtcagaatattaatgaccagaatgacttcaatggttgttatactaagcagaatgcccgcaataatgggtgaaaacagaaacttcgaggattcagccagttgtacaagaccgctgccttttgagaattgatccttatccagcaggtccgtagcagaggccttatatgccgggctctgcaacgcagagaacacggaactaaaggctactcccacatagatatgccataattggatatcacctgtgagcataatggacagaatgaaaatcaaaccggctgccgaccccaggtcgccgataatcatcatcgttcgacggtcgaatcggtctgccagtacccctccaataggtcgaagcaggatattcggcagaaacgtgaataaggtaatcaatgcaacacttgttgccgtattcgttttttcgaaggcatacacccccagggagaaggctgtaagtccaatcccaatcatggagatgagctgaccgaaccatactaccagaaactttttaaatgatttttgaacggtatgttccatggatgatactcctttctcggctaaccttgattcggaaaataaagacgagtgacgtaggcgaagcttccttgttctgctcccagcacacgttccataatatgtgtgaatgcttcaacctttttttggagttcttcctcctcccattgaaagatgcctcgatccagcaaaaattgtgacgatacgagcaggaattcgatggattcctttgggttaggtgtatgaaataccccctcctgaatgccctgctctaccacctcggccaagatgggacttaatcgaattactgtctctacaagactcttttggtgcatctccacattatgaacactgtgcaattgctcgatgagatcatgttttctgccgtcaggctgattctgcgccatcatgatgcgaaaaattttgtcatgggcattcagtttgggatcggacaccacgtgcctggccgatgcctccccgctcagaataaaacgcataacgatggcgttcataacctcttccttggactgaaaataataataaaatgtacccttggcaatgttgcacgcctgtaggatatccatgaccgtagctttggtatatccctttgttacgaacagaatctcggccgcatccaaaatctcgttcctgcgttcttccgggttttttatcagtctcatatcctggcctccgatacgttcgaccgactgtcggtctattgtagtcatggagttctttttttagaaccccatttcagtcaaccattgcgccaaatggctttcccttgtttttagatcctgacgctctcttgcatattttccaatatttctgtctgcaaccagcttaccgtccatcataaacagtacacgttccgatctggcagcgactttcacatcatgggtcaccagcagaatggttgtacccgttgcattaatatcgcccagaatatccatgatttcatacgttgatttggaattcagcgcccccgttggttcatcgccgaataaaatatctggattattgatcagcgcacggcagatggcaatccgttgaagctgtccgcctgaggcttgggtgatgttatgcccagccagctcatcaatccccatttttttcattaatgacatcgcccgtgtattaatcgtttctctgctgctattcttggccagatacgcggaaagtacgatattgtctaatagattcagattcttgagcagatgaatattttgaaagatgaatcccatcttggtcaaacgtagacttgccagatccctctcctcaaatgcagatatttttttgccattaaaatagacacttccagcactaatctgatccataccacttatgttgtacagtaaggtagacttgcctgagccagatggccccatgatggaaacaaattctcccttttttaattgaaggttgatatcttttaagatgttatgttcttcattctcgccgatcgctacggatttattcacgtctttagcctcaagtatagttgtcatcgttgatcctccctattcgacaatcattttggatatgctcgtttccttgatcgattggatactaatccatgctgtcagtacaatcgtgcccgcaagtaacaatggacacaaaatatatgcctgtaacgggttaacaacaaagacaatattagaagcaccaaacgtcgacataatggcactaaccagcaacggacccaacgtattggacaatatcgttccagtaacaacccctaagattaatatgacaagtgacatcacgacatacttgaacttgattttagacaaggcaaacccgagacttcttagtacagcaatatcgttgttgtccttggctactaacatctgaaggaacagtgctgtaattaaaatagatatgaagacaccgatgaccaaggccagcatcgtcaccattttcaattgttggatggttccgcctaacgtctgatccagataaccttgaagatcggttactttggctggcgagaaagccgcctcatattcagcaattttggtagccatgtcaccgcgattattcagatccaaactgaccacgtaccacaacacactatccttgttgtagggcaataaggccttcgccgttttgccaccattcgtaacgtcctggtatattccgctgaccgtcatcatctggtccttgccattaaccagcaaggtaagttgctcaccagtcttcaggcgcagctcgctactgttggcatcagataacgcaatttcattctcggttgttggcgcattaccgctaacataagacaatgggaaaatactgaaatctccagtttctacactcagattgtcgtaacttccttccgcatttttaatcttgaactgacttgttaccaatggggaatacgttttaatgtctttatcattttggatctgggcaaccagattgtcataacgctgctccacatcatctgtgtgcctcaagtcaatgcgaatatcactttgtccaacacccatataagagataaaacttggcgcctgcaaagtgttcaggaagttgaccggcacaatcatgataaatgaactgactacaaagacgaacaacaataatcggaacatcttgattcgctgtatcacttccttcagaccaagaaagacaggtacggaagaccagcgattgcgggacaaactaagccggtttcgaatgatctgtgtatcgcccaggcttccggtacggagagcatccaccgcggagatggaacgaaaacgtcgcagtaccgttcgacagaacagaacaaccatggcaaatattattccagcggctaataacggaatcgcgaaatgcaacagggttgcaggtgcttttcccatatacaacataatgttggaaacaaatagtctgttaacaccaagtgatgcaatgtaaccaagcacggatgcaaatccggccataaatacatacttcatcagatacagtctcttaatatccttctctgcaatccctatcgctttcatgacactaatctcacgataatcctcttcgatggtcgcaagcatcgtgaatcggatgcagagcatggcaatcagaatcagcacaagactgaccagaataataacggctgcaataactccgtcggtcatggcatttaatacctggaacagcccataggttacgactggacccgcgttgggaagtccggcattttggtaagcctgggtaaattcacttgtcagtccgggatcggtcaaccggaattcaatgagatactccatctctccgatgctctgcttcagttcctgcaaattccctgcactcacgataaaacgtttggagtgcacaaccgatggattcatctgagcatcacggacaaaatcaacgatggtgtaagaacgctcaaattgaccattatcgatccgaacctggtcgcccacgctcaattttttttgctgcatgtaatataccggaaccgcgatctcgccatcgttgacctgaataatctcactgtccagattcaacaaatagtcgaaaccctgattctgtgtaacaaagtcaatgtccataacactgttcttttcggactccgctccgagaaacagattagagccgtcaatgttgaccatttccacaatctgatgctgctggaccatggcattttcttcagcccatgtgttcactttggcttgatcgatctctcctgcatgcatttgcacaaagtgtggtgttttggattcagaaaatagatattgaatggaactcgtcagttccataatcattcgtgaccccgaagataccagcaaggcggccagcagtacaaaaataaataacgcagccgtaatccctttttttctcgttatatcgtttctcagcattcgtagcagcataaacgaacatggctcctctcatctacaagttgttcctatttatctggagtcataaagcttgtcagacaatgcgccaccgttgaaggttgatgcatcatgaacatgtgagcaccctctttgatggtttgaagcttcatggatgtgccaaaatatcggccccatctcaacgctgattgaagggtaacggtacgatcccgttctccccacagatacaacaccggcaatgagagcggctcatattcaagcgttgctgcagattccagcatcctgaaatccgcccggatgacgggcagaaaataattcaataattctttttcatgtatcagttcttgcggaagagcttcataggaaaacagatgatcaatcagattttcgtctgacatccgatcataattctgcatcccgcattcgtcaggcgtgttgcaggcagataacacaagccgtagcgttttagctacatctggacgttcctgacataagcgctgcgcaacgaagtaggctgtaattcctcccagactatgtccaaataacagactgccgggctgtataacatccagcagtttgctggtatacagttctacgagttgctgcatatgctccaggggtgtttcggtgttcagaccatgacccgggggcgtaaacgcccaaatttccgtgtcaggaaggtacggcactaggggctgaaaactgttggagttgccaccgagataaggaaaacagaccatttgtctgtttccctcccccttttgtagctgctccaaatagatcggttccatcacttatccaccaccataaccaggcttactttctttccagaacatatgcagggaatgtctgaagtgaagtatccacatttttacgcttgaaaatgacatgtatgacaatagccgatattgcaaaaaagaagaattgcataatttgaacttgcggattaaagtagtacaaatcaatttgacttcctgtagctacaagccagaatgcaagcagataaaacagaagtgtacctttggttgcattgaagatataactttggaacacgataaatgccataagctgaacaacgtagtatatgtaagtggttgaggtgccaaaagaggaaatcaagtatcccggaagcacccataatccgaacaacaggccggtaatcagaccacttgttatattattttttaacttcccttgcaagaatggaagcaaaaatccgatccagccaaacagcccaccaatcagccccgtctccttgatcagattcacaatccccaaccagatcatttcaggtacactatatgtcagttcagggaccggtatgccgaataacaaggaaccaaagtgcattgttgatgcaaagatgatggaaattccaataatgagcggtatccagaacaggtcctgtctgcgcggaaccagcttcataaacattccttttaatgcttccgttccgcccatcacataacatgtaattaatccggcaatggaaggtgaatacagagcaacgatcgcaagtggatgcatcaaggttaactcacctgttatgggtacaataaaatccgcaaagaacatgaacaaacttgcgattccataacatgtgccaaaggaaattcccaaaaacaaatacatatatttgttggacgggctggttgccggacttgtgactggacgaatggatgcctgattagctgtaatcatagtgccgcctccttctcagtcaactttctctcaataagatcatgcaaacggttaatcgtgcagaaattagccaaatccagatcttcatttgctatctcaatctggaatctacgctctacaaagtccaccaaacgcatcgcaaagagcgaattgacgaaccgctgctcaaaataattgtcattatcattaatttgagtgtcctcatgatccatggtgaggttgttcccgataaactcccgaatttcctgacgataatccactgcccttcccccttgttattgatgttgcccctcgggcactaaaacctcaatgtaatctggaaactctacagcctgctgcaaatcatgataaaacagtactcttccttcctgatctgcagattgctgcttgaaaccggcaaagcgatagctgatattcatcatccggttccttccggtatccctgaagtctgcaagcatctgtttgccctgcttctgagcttcacgcatgatatacgttagcagtacactccctgctcccctggacatcactctgcaagacattagaagcatgtttagccgccatactttctgctgcatgtgaattagtgcaagcccaatttttccatacgtcccgtatttgtcttcgagttcacacaccaataacatgtggtcctgcgaggtcatcagttggtgcagctcctcgtaactgtaggtaattcccgttgcatttagctgattggtgcgaacggtaagttcctctgcacgttgaaggtcatcctcagtagcctcgtagatggaaaatttcatgccgagcgtagccagaaattgttctgaaggtccttcatactgttcctcagcctgtttacggagtgtatccgcctggtacatctgccttctgcacgcagagtcggctgtaataaatcggggcatcagccttgggtcatcaagcatggcttcatattgatccgcatgaagtacctggatgtcagcatgtacactttgcacttcttccagttcaaaaggttgatcatccacaaacagaatggcatccatgccgatattaatgttctgctgaatccgctgaacagagacggattttgcatcccaatggatctcgggatacagaaaatattcggcgatgcccagttcgtttagtttcgcccaagctagctctgcatcatttttactggcaacagaatgcaaaatacctcgctggtccagtttttcaatcacctcctttaagcccggcttcagttgcacatctgcagattcaagcaaaactccatcccatatggtgtggtccagatcccaaacgatacacttgatatccttgagcttttccatggtcatgccacccttcatcttagtaggcatagaatccttgacccgtcttccgcccccactgtcctgcatcaaccattttctgcaacatcggacagcatcggaatttggggtcctgatagctgtcgtacaatactttcaatgaatgcacgaccgtatccagaccaatcagatccgccgtctccagaggccccatctgataattgaagcccttcttcataatggcatccacctgctcgggtgtagcgattccatcctgtacaatgtacgccgcttcattcattaacaagtgcgaaaggcgattagagacaaacccgggcagatcctttatgacaactggacttttatcaagagtttccaaaaatgctaccatctcatgttccgtaccctgtgttgtatgatgtcctttgatcacctccaccatggatttaacgggaaccggattcatcagatgcaccccaatgactcgacctgggtcaggcaaaaatgaagcgagctttgtcacggaaatacagcttgtatttagcgcaaataaagcatccggacgaaccttgtgggatagtcgtgcgtaaacttcctttttcaactccaggttttcggttacattttcaataatgatacttgcctcttccaccccttcatcttgtgtctggaacgagattcgttccatgatctgatccaggggcacctgaccgtacccttgcttcagaaagcaagctgaacgatattcacgccgtataacatcaggggcgtgttcgatgaccgacgccgaaatatcctgcaaaattacacgataaccagccctcgcgacatccagtgctgtggcgcatcccatcacccctgcgccaatgattgcaatgagtcgattatgcatacctaatcacctccttattgagctaccatcagatcagctcgtcgtagatctctttcatttctacaagcgctgcagggacacgctcacggaaccaggcaacatcttgcatatcaagcaggatattcggatacatccgcgagagcgtagataccagaacaccgtgctcagcaagcttgctatttaacaaaatatcaaaagacatcaattcaaacgtataatcagccgtatccgtaagcggctccgtgcagcagtgataagaagcacagccagacggcccttgaacaattaaaggcagacctaccttcactgcttcctggcagagtatgtcatgcatcatctcagcgtggcggttcatgctgtgcatcgcctgtcctccattgcgtcccaacatttccagcgtagcttttacagcagctgtacctaatggatagccattaaacgtacccgcatgaattacttttttgtctacaagcaacttcatgatatccgctcggccaaccagggctgacaccggaactccgccacccgcgattgccttcccaagtgtagtcagatcgggcgttacaccgaataactgttgtgcaccaccgagtcccatacggaatcctgttataatctcatcaaaaatgagcacgacctggtactgatcacataactgtctgactttttgcagataacccggagcaggcatgactccgcctccatttacacaaaccggctccatgattactgctgcaatgtcgtctccatgctggcgaaatagttcctccagacggggtgcgtcattccatggcaggaggtaggattgagattccatggcatcccttgccctcccctttgttcctttcatgtcaccaggatagtctgaaggtaccggcaaacctgtacgtgcagtcttgccacccataatattgtccgcattgccatgataatggccttcaaaacgtacaaagcgatttttacctgtccacgcccgggcaagacgaagtgcattctggacaatctccgtgcctgataacccaaaacgaatcatctctgctgagggtacatattgatggatcagttccagagcctctgcatccagatcgcaatgacttacggaaagaacacggtcaatggtatccttcagacactcgttatactcctcgttgccgtggccaacaatgagggcaccaaagcgggcatatagatccaaatactcgttgccgttcatgtccgtcactctgcttcgggaagcatgcttgaaatggagcggtgtctcttcccaaggaaggtgaaaattatagtgcacaccgccaggcagccattgtttcacccgctgattgtactgcatcatctccgtgatcatcccttatcgcctcccccacttgtctggtttactgcttcatatctatccagtaacctggaccgatcttgcggatcatccagcgaataggctgcaggcaaggtcttattctcagccagcatatttcttacgctctggcctggaccgatatcgatccataccgtcgctcccagattttgaacacgtgccaatgcctgattccagcgaatgggttgcaaaagctgtttgctcagcaacttaggaatgtcctcggctccgcgaatgaactcaccatgtactgttgagcagatgggaaacaccggtgcagagaaggaaatccctgcaagcatctcttcaagctcagggtgaatgaactgcatcaactcgctatgataaggtgcatctgccttcattggcatcatgcgaaaaggaatgaattccccaccgtagccatccacctgatcatccagcagttgaagacccttcgcagtacctgcgacgacaaactgtcccggtgaattataaccggagatcgtcacatactcgttctgacgaatattcccaactaattcttcaagcgcttcttgggttacatcaacgacaatacccgctcttcctttttgctcctgaatggagcgatgcatcaacgcaccacgctgagctgtaaaacggattccatcagcaaatcgcaatgctcccgccgctactaaagccgaaatctcccccaaactgtgacctactgcataatctggagtcattcctgtccggcgaacaaatgagtcaaataaaacgtagcttgccgtcagtacagcaggctgagcatattcagagaccgtcaattgatccaaggtcccttccataaccagtgccttcaaatcaaatccgatcacctcgctcgcttccgcaaagatctgattcgcctccggttcactgtccaacaattcgctgcacattccgatatactggctgccctggccgggaaataacgcacagaacgtcatacgctaccgccacgcttgtaataggcttttaatccgtaatgcgagatcatctcctgctgcatctgagaggaaccttcaataatctccagaattttggcttccttatacagcctggcaacaggatattggttactaattccgttcgcaccatgaacctgtagcgcatcacttgcaacttcaacagcaactttggacgtaaaatatttggcgatcgttgtctccatggcggcctgcgggtccttggcttctctcagctcggctgcccgtaaacataatgctcgtgctgcatggacttttgtcaccgcatctccaatcatgccgcgaatcagctgaaaatgactcagcttctgatcaaattgcttccgcttccttgagtaagtcaccatggcatccagcgcttcctgcgcaatcgccagccctgcccaggcaatgctatatctgccctggtccagcgccccggttacgatgtactcaaaaccttcattcagacgtccaataatgtgattctttggtacacgcacctcatggagatcaatctcagctatacctgtctctcccgcaaccatgacaccttcaataggttgggtctgtacaccctcaaactggcgttcgacccaaaaagcagtgcttcgtccctgattcgaggcaataatgataaatacatctgccagatgtccaaacgtgatccacttcttttttccattcaaaacataacagtccgattcttctctccactcggtctttacacttttggcatccgaaccaacttccggttcagtcaggccaaaggcagcaatccattctcccttcaccaacttgggcagccaggacgatttttgctcaggcgttccgaaacgtaccaaagtttcacttacaagggaagtatgtaccgttaacaagctgcgaacggctggaagagccttaccaaatacttcagtcaacagcccgtacgccttagggccgagacccatgccgccatattcagccgggatcgaggcagccaagtaacctttttcagccatggcacggatcaatgttctgggaatggcttgctgttcttgaatctgttgagcataaggacgaatttcacgggcagcaaacaattcagcttcatgaatgatctcttgctctatatccgcttcaatcattcggcaaccccctcttgaagaagagattcattgagataagcggcgaactcggcaattgttttgtattcaaacaacgcaaccggactgatgtcaacttgaagatgcttacgcgcacggttaatgatcttgagcgcctgcacagatgagacaccaattttcaaaaaattcatctcttcatcgatgtcctctggctcctgattcaacgctgcagcaatctcgcttttaagaaaaagctcaatttcttcttttgtcatatcatgacctccgttccctgattcacatctatccaatgtacatacggctcgaatggatgtgctggcagatgtacaatctggccagagccattcggatgtaactgttcccaatccagcgcagcaccacgtacataaagctgtcccagtaataaagcaagctgatcctccatggtaagtgtcggctcggcagacaggcggatgatgctctccttgccactgtattcgagctgctgaactgtctgatctgcagcaattataattacaatgtcggcgtttgccatcttgccaggtgtgtcttgcagactgtctaacgtcactctgttgttcactggaatggattggcttgcatgagcgctgtgatgttcctcgccatccagatgtaaactggatacaagttcctctcctgtagctattcctcgaatctcttgaatggaagggaccagacgtacaagtgtctcaagcaaagtcacccagtagttcaaggttgatacggtatcttcattagaatcgtctggcctgataaccttacgagcttgagcctcatcttctccgcgaatctcatgccccccaaccacaatattgacacgagcagctcggtttctaggcttgaagccaaattccatctcttcgatgttccactctccggttgagctgacagctactgctgcacgataccgataatgttttctatatctgttccgggtaaaacaaagatcctctagtgccaggtccgcatgtttcttcacatattgctccgtgttatcaatcagcttttttaaagcctgctctgatttcgcagagaacgttaacaactggccgcgtgccggggcttctgcacggacaggggctttccattcctctagcacaatgtgggcattcgtacctcccaggccaaatgaactgatgcctgccttccgtgtttttccttcaggtacatcccacgttttatgctcgctaacgatatggaacggcgattgctccagtcggagggccggattcggattatccatatgcagacttggtgccagttccccatgctgcatactgagaagaaccttggcaagactggctccactggaggctgcaaataaatgaccaatattggttttgactgaacctaatccaatcgaattatcgcttgtatatcccttttcccggaacagtcggagcaaggcattcacctcaattggatctccaatccttgtccccgatccatgtgcttcaatataagaaatctcgctcgggtttaggttggcatcgcgataagcggcacggagtacctcatattgcccctgagggttgggtgccataatgcccagggaatatccgtcgttattcaccgctgtcccgcgaatcacaccataaacatgtttattgttgcgaattgcctctgttagcggctccagatatacaacaacagcaccttctcccaagactgaaccatctgcttcccggtcaaataccttcgtatgttgagtggaagaacagattccagcattgcgtgatagttgatgaacatgcggtgtagccaaaatgttcgctccacctacaactgccccagagatacgcttgtcctgaatggccgccacagcttgtgtcagtgctaccagaaaagaagaacatgctgtatctatggacagtgccggccctgtaaaattgtacatgtgtgaaatggaggccgctgcaatattggacatattgcctaccatagcgtgagaatgaacagcctttccaagacaccggttcatataatcaataaccagatcgaagtatgtgcttgggttaatccctacatacacacccacatcacgcttatcctcatggtccacgagcatacccgcatcctccagcgcctcatgagcaacttccagcagcttgcgatgctgcggatccataaatgcagcttgttcagacgggatttcaaagaactcatgatcaaacgtatccggttgcttcagttccccaatccagtcatcccaaccgggttgcttggaacgtgttgcacgctctaagctaacccggtcaacactatctaacccgttaaccagattgctccagaactgctcttgggtgtcggcatcaggcagacgcagagacagcccggtaatagcaatagcacgatgtacattcaggtgattatctgttgtttcagcttgttcaaagtccttcgtttctgctggaaggtcctgcagatattccaccatctcacgtactgtactgcaaaaaacaagtagttcttgtcctaattcacgtcccatatgtgcagacagcttgtcaagtaattgataagagagaatggaattgcctccaagtgcgagaaaagaagtatccatctcaatctttcctgcgggcaattgaagaatttcggcccaggccttgcgtacggtatactccaaagacgatgcggaaaccgtctcgtgttgttgttgcgtgttttcgcgaatcagctcttcaatggcctcgatgtccttggtaaatactccacgctcatattcgtttctcagcatgaagcgctggaccttaccactcgtcgttttgggaataaccttgattgggagaacatgggtgatctcaatacccaatccagccctcatacgttggatcagatcctgacgtacatccagaaactgtggagcgctcgatttgtatttaacaaatacaagcagctcctctacttgtttgaggctgttaaagtgcccgactaccgtcagattgcctctcggaatgctgctattctggtacaaaatttcttcaagatcatgcgcataatggttctgtccccgaataaacacaatgtccttgattcgtccgcttacaaccagggagccatcagccatataacccaagtctccagtgcgaagccacccatccacatacatttcacgattgatctccggaagactgtaatatccggaggttaccgattccccacgaatctggatttcgccgacaacccgctcatccagcacttcaccctgttcatccgcaatccggatctgaatccctgtcatgggatatccttcatggacaaattcgatcacatccgaagtatggctatcactgctaggtagctggactggcacagccagtccttcctgcaccagccgtgtacgcgaaatacgttcaattcgtggctcttcccccagtctggaggtacatacacctactgtcgcttctgccatgccatatgcaggaaacatcatattgggacgatagccacaagagctgaattttttgacaaatcgctcgataacagacgttgatataggctctgcaccattcaaggtcatacgcagtgaagacagatccagcgttgagagcttggaatccgggatcttctgaaccatccattcgaaaccgaaattggtgcagcaaaaccattttccctgatgctccgtaatcttgcgcaagaacagataaggcgaccgtacgaaggtataaggtgacatcaccattatgttggctccactcaggacgggtgtcagatgctgtccaaatatccccatatcatgcgtatgcggcaaccaggtaaacacattatctccttcttcagctccaagaaaagtcttgcatgcaatactgttggcaataatattgtgatttgttaactgcacacctttgggaattcccgtgcttcctgatgagaattgcaggaacacaatgtcatcaggagaggttgggcatagatcagccatctgctggcctgcttgaagctggttcacgctaatcaacataagacctttgaataccggactttccgcaagctgcttatacttgggcatgtaggcttcctcgacgataacgactggacgcccgagtacctcccacactttcgtgaatttctccagaccggctgagcctggttcccaggcagccggaggactaaccggggcgacaataatgccccccagcatacaagcccaaaaggtacggtaaaattcctgtgactggtcaatttccaaaataacaacctgtccttgttgaatgccttgctcctgaagagactgcaggtagttgcgcgcctgcatcagtaattcaggatatgattcaaactgttcgtcacctgaagaactgatataggtcattcccttttctggatgagtatctgcaatgtagattagcatctcagccactgttgaataatgttctggcacaatcagctcgggtcctcgctgtatggatttactggacatgttgcacctccattgcctcattgtgaactaccactctcacatcgctaccaagcttgtcatcaatcagctgtttcatacgtttgatgtccagaccagcctgacaggccagatgtacgtacagacactcttcgtcgtagcgaataacccattcgaattgagcgagtcccgaattcgaatcttggtcatccgacgactgagacgacattgggatcgcttcgctactggagatgaagccttgataattaaacagaatcatctgacgcggctcctgttctgcttgcctgtaggcagttcccaattgttcctgtatgccatcatattgtgccgagagggaagaatcatgtgtaagtgccataaagttaatgctgtgttgcttcgtaaattccagacgttccaacagatcttcctgtgtgaattcactgtctaccagcactggaattagatctaggaattctcccacataatcatagtaggattcttcgccatactcccttccgtaatgcaccagggctattggcaattggcttatgttcagataagccgcaatgatgttggaaaaagtttcaaagcatgtccaccaaacctctgcaggctccttccctgcaagggacaactcgacagtcatcgctgaaggcgacaatgtttctgtttccttcaacttgttcatgacgatggcgttacatctattccatgcctgaagcgaaaattgtttctccatttcatcttctgatacccctatggggccttgagacagaaaatttacataatcctcataatttcgtatttggtacagaagatcactctcgatctctataccttgcggtctatataatgccttcgactcaagttgctgcttgatgatctgggcactcataccatcaaacgcaaggtgatcaaaactccaaatcaacttatgctctgtggctcctgtacgcaaaatacacagacgccaaggtagttccttcaacgtatacgttttgtgtaacagagactgaaccagtttgtactccaactgctcaatcgtagccggagcataatgacgaatatcaagatatgggataagctgttgcagcatgtccgccgctaacgacatatcacatggatgccaatacaattgttcttcctcatatatcatgctgtgcagcaactgatgccgggatataaccccaagaatcaggtgttttacagcttgttcattcaattcgccttcgagcgttgttgtaaatccgcttgctcgtgaagtcgtagaagcatgtgcttgttgaattggagatagtgggaattgacccataggggtcatgcccgccataaaagatgaaacctgattgcagctgtttaagacatgcaggaccaggctgtccagttgtttctcatgaagtgttatgtcctgtggtatgactatcggggactgaatatgcaggctatcttcggaccaaactgacgccggaggattaatatctaccaatttggcaagtcctctaactgtcggatattggaataattcgttcacattgatggcaattccttctttttccaaaatttgagtgaatgcaatcgctttgagcgaatgccccccattttgaaagaagtgatcttccacaccaatgcctggattacccaggatctgtcgcatggcggcaagaatgacacgctccgtttttgtccgaggtgaactcacttccagagaccgctgctgctcttcaaccaaatgctcggacaatgctcttcggtccactttgccattggcattaatcggaagatgatccattcgaataattcgtgcaggcaccatgtactctggcagctgctggtgaagttctcttcgaatatactcagcatctgctccagtatcggttgtataaaaagcggcaatgtatagacttcctgatggttctgtagctgtcatgacaaaggcatcacgaactcccgaaagacgctccacgtagttgcctatctccgataactcaatgcggaaacctctaattttgacttggaaatccgaacgttcaataaaaatcagactgccgtcagccagacgtttgacgatatcacctgttcgatacattcgttctcccttgcggaagggatcatcaagaaagtgttttcgggtaagatcctcacggttaagatatccaatacccaccgcatccccactgatatacagttcacctggaacgttgggtggcacaggcttcagctcatcatccagaacatacaaagctgtgttagacagggggtaacctatgggcagtgagccagtatagggctctgtttgctgtaataagtggtaggaggcaaaaaaggttgcttccgttggcccatatccatttaacagcctgcccggccctacacatgcaagcgctttgttggcatgactcaccgatgcagcttcaccaccaaacatcactctacgcacactcttcaagcaatcagcatcccaatccaccagcatattaaacaaggatgtcggaatataaaatactgaaatccgttgctgttggatgacatccgccaaacgagccatatccaaaatggtctcttttgagattaatacaagagtagcgccatttattaatgaagcaaaaatatcgaaaatggaaccgtcaaacgcatagttagaaatttgcaggatacgatcctctggcacgacggtgacaaaattactgtttttcatgactttggtcacattgcgatgactcatcacagtcccttttggggttcctgttgaccctgatgtataaatgatataagccgggtcaagagcggtcatgttcatatgttcaacgggctcctggatgtctcctgaatcaaatgctgccagttcatctgccggcacgatacaaggaactaccgattgccatgtcgaggcataagccgtttcagtcaataacacagccgcatcacaatcttgcaaaataaattcaattctcgatggcggcgaagccgggtcgatcgggacataactgcaacccacttggagtgtagcaagaatactgatcatctggatcggtccacggtcaagaatgagagcaatactggagcctgattttaccccttgtccaagcaacctgaacgccagccactgaacacgttcatacagatccgcatagctccattcaccgtcttcccagaccaatgctgtcttctgtgcatgcacatggacttgttccttgaataattgggaaatggtcgcatctcgcggatactgggcggcattatcgttgactccgtacagcagccattcctcttcctccggtgtagtgagcttaatctgaccaattcgttcattatcccctgttatgatctgagacaggatataccggaatttatccagcatcagttccatggactccgctttaaacaaatctgagcgatagtcaagttcaaccgtgtaacattgtttatgctcgaccagtgtccaagtcagatcaaatttggcatccaccttaccttccacccatggttcaagcatcagttccccggcttcaggatcattggtccccatattaatgtaatttagcaccacatcaaatagggggttgcggcttaaatcaccgaatagaccaagttgttctaccagtgcttcataaggataatgctgatgttcataacaggataacagcttgccacgcatctcattcaaatacgcctccgtggaccattctctgtccatgctggtgcgaatggcaagcatgttcacaaacatacccataacgttattaagttctggcttctcacgccccgcaaccgctgtacctacgaccaagtcgtcttgacccgtatacttccagattaatagattcaaagttgccataaacaacatgtagggtgtaagcccttgttgagtacagaagtcattgacctgtgtgcttaacgactcaccaagttcaatggaacgtctgtctccgctgtaagaggacgcgccatgtcttgggaagtctgtaagcaattcaaccgatgcaggtttgtcctcaaattcccgtatccaaaactcggcgtctttaacagattgtccatgtgacgcagcttcatcacgccattccgcatagtccttatactgaatgtcaagagattgcaatgtttctcctctgtacatgcgtgcaaaatcctgcatcaggatagcaatggaactctgatccgaaatgatatgatgcatgtcgatgaataagatgtgttcctcttgagaaaggcgaatcagcttaacacgaaccaatggtgcgctggtcagatcaaaaggcttgatccattccatgacctgctctaaccctgctgtttctaattccagcaactccaccacgcttggaacctgatcctcgacaacctggaaaagctctccgtcaatcatttcaaatctggtacggaatgcttcatgtctctctaccagtgcatccattattaatccgaattggttagggtcaagttttccccttaccctataggagctggcgagattgtacgccgtactctcacctttcatccactcatgcaccacatacattcttcgctgtgcagaagtggtcttgtatttctctttcttagttacaggcaagattgggttcactgaatcagagtcacttgtagcctgatgttcagcaatccattgaaccatgtgttcaaacatagaatgatcaaaaacctcttccagccccaaatttaatccaaacagttctttaatcctcgacgccaaggaaatcgcttttaaagaatgacccccaagctcaaagaaatcatcttcaaggccgacttctccattaccaagcaactcctgccacaattgagataatacatgccttatctcatcatcagtccgttgaaccctgactttcccagatggagattggtctaatgctgcgatagaacccgctgcaacctgcgacatacctgcaagctgatacaacgcaacatcatgttgatgaacaatggggtcaaaggaatacgtcggcagcgagattttttgcctacgccccgttccgtttagctgttcccaatccaactccatgccagagcaccagcaaaaagcaagtactttcattaaatacacgtctgcctcaagcaagctctgacgatctccagtaagagcaataatgtttggctctgaaaatgaatccggggctatttgttctgtatcctgctgctgattcgaaacgatccacaacgtatgcccatcagattcagaaagcgtcttgcgatttagcagcgtaaacaggaaatttggagataacagtggtgcaatactcgacgcatggtctgttacagttgcatctgtcatccttcctgtcaaagcatctgacaatgctccttcttctagtgaccaatcctccagattgtataaaagccccacggcatgtactggatcaagtgcatcactaataaccaaccccaccagttcgccaacgccttgtccacagacagcatctggcttgacaccaagctgcatcacggttttataaagggcatattgcacaacaaagcactgcatgcgctcaagccttaaatcggttaacgatcgccctatgccttggcgaatggcatactgttccttggactcaaagaggttcagtatctcttcaaagtgctgtttgaatatctctgagacctggctgcgatacacagaagcatatagttcccgaatcttgcgcgcttcccaacttgcatttccgctgagataaaacatgaccttaggcttcccattcatcacacttgcctgtgtctcaaactccacagtttgctcgattgacggaatataaccgtctacaacgattagtgctttacgatgaatgaatctgcttcttcccttctgtagcgtccacgcagcattgggcaactgctccggcaatgcatggatcgcctgtagaaccgaatcgtatgtgcgttccagcgcagattcactcttggctgagaagggcagcagcagcaaagattcataactcgcttggctctcctggacgggcggttgctccagaatgacgtgagcattggtccccccgatcccaaacgaactgatacctgctcgcaggatacgcttcgcgtcttctaatggctgtggctccctgttgatatagaagggactatgctccagttccaacatcggattcgcacgattcatgtgaatctgtggcggaaccacccggtggtaaagcgtcagtacggttttaataaaaccggcgacacctgctgccgcatcaagatgcccaatattggctttcacagaacctagagcacaataatttctacgatctgttccccatgactgcctgagcgcttcaatttcaatcgggtcccccagtttggttcctgttccatgtgcctccagataggagatctcttttggagacactcccgaacgatgcagggctgattgaataaccttgacctgcccggccacactaggtgccgtatatccaattttgtccatgccatcattattaatcgctgaacctttaatgactgcatagatatggtctccatctctctgcgcgtcgcggagtgacttgagcacaaccattccgcatccattaccagacacagtaccagatgcctgctcatcaaacggtctgcaatgaccatcttttgaataaatcatgccttcatgccagtgataaccttctttgagcggataggagatagagacacctcccgcaagtgccacatcacactccccccgaatcagcgattcagcagcttggtggatagcgaccaaagaagttgaacatgcggtctgtacggccatactcggccctctcagatttaatttgtgagatactcgggttgtaatatagtccttttcatttaaagtcatggcttcaaaagcctgtagcaaattaccggaacgacctagaaattgcaccatccatggtaagctcagtccacttccggcaaacaatcctatagctccctcataactgtaaggatcacacccggcatgctcaagcgcctcccacgagcactgatgcagcaaccgtatttgcggatccatcatgttggattcctgatgcggatattcgaaaaatccggagtcaaaatactcagtgtcttgcagtacacctttggcccgtacataatcgggatgtttgaagtcttccggtcgtacacccgcagcggttagatcctcttctttcagacgggtgataccgtccttacctgccattaggttatcccagaactcctcaatatttcttgagccgggaaaatgccctgccatgccaatgactgcgatatccgacgaagaagaaattctgctactgtgttctgaagcaaacgggatactctgttccggtctgctctgctccactttgctgtgttcaactgtgctcctcacatactcttttggagctgttgtcggctccgagttcgtaacaggatatccagccgaagcgatatgcccattctcctcttgcacctgttgtgtaactgtcggcagcatctgctcagccaccagatgattgaccagtgatgcaatagaggaatgctcaaacaattgcaccagcggaacgcttttatccagataggcattcaggcgattattgatcagaataagccccagcgagttgcctccgatgtcaaaaaagtgatcatggatattaaccgtatccagattcaatatttccttccacgttgcaatgagcatctgctccagatcaacttttgcccgctcgattccttgaatcgatgagccataaaccagagccgggttatccctctctgccgtttcaaaatcagccagacgaagggcattgcgattcagtttgccattaggcagcacaggcagattctccagacgaatcaagcgagaaggcatcatgtactgtgggagccgctgctttaaccaggtccgaagatgtacgtcttcatctcccataacggaaggcccaatcccaggcttcagactgtagaaaaggattaattgcaatgaatgtggctcggccccttctaccttaacgacagcttctcttacacgttcgtaattcatcgctgcctgctcaatctcgttcagttcaatccggtaaccacgaatcttcacctgctgatctaaccgtcccattaactcaacatccccatccggcagtatacgggccagatcaccagttcggtacaaacggcctcccaaaacattggggtttgcaatgaatcgggcgtcggtctcagcagcattgtgcagataaccgcgggataatccttttcctgcaatgcacagctctccatagctgccaggtggcagtatttcaccttcatcattcagaatataaatctctgtattggtaatgggcttgccaatcgtaatcacggctgtgtcattcaattctttggtcgttgaccagatcgtagtttccgttggtccatacatgttaaagactcgagcaggcgtaagccgcttcagatcggtgaggagtcccacagggacattttcccctccagtaagaacacaccgcagattgcccagcgcctgagcgaattccggattttcgacaaatgccttaatgcgtgagaccgtgctaagaatgtgcgtaataccatattcacgtattcgacgtgaagcaagagccgggtcaagctgctcctgctcattggccagatacagcgaatatccggtgcataatggtgtccacacttcaaatccgaaaatatcaaaagatatggtcgttacactgatgatacgatctgtctcatgtgcaaaaatatgtcggtgcctgatgtcctcaacaaaattgaccatcgcctcatgagtaaccatcacccctttggggcgccccgtcgatcctgaggtaaaaatcacacaggacaggtccgaagacaggaagcttatgtccgggttaacggatgagcgcacatcctgggcagttggatcatacacaaatcgctctccgctaaaagtcactgtgccttcttcatcaggcgtacacagcaaaacgttcattcggctatcttcgatcatattcacgatgcgttgcggtggaaaagcaggatccagaggcacataagccgccccagctttcagcactgccaatagcataatgatcaacgattcatctcgtctggataatatgcccacaggttcatcccggcgtacaccttgatcaataagcttccaagccagtgtattagctttttcattaagctccctgtaggtaaaagcggctccggatgatacaaggagagctttcttgtctggtgtgtgttctgcctgcagctcgaacagccgatgcagacccaccgcaggattgtaatccagacgtggaccagcaagacgatggactgggtgctcatgagaaatgtttctctcatacagttcgctcagagacagattaggctgttgtacaacctcttggcagagtccgataaactcctgcatcataccttcaactgtgtccctgcggaacagatccagcgagtattcgatatatccttcaatcacctgcttctccctgttttcttgacaggtcattaacagatcataagtagacgtacccgtctccaccggaaaagaactgaattgcaagccatgaagttcaagtccatgcaaatccatgttctgataatcaaaacaaacatcaaataccggatttcggttcaactcacgtgtcacgctcagttgtgccacaagctcattaaacggatactcctgatacgcaaaagcatccagtgtatgttgtttaagttcgcgtaaaaaatcagtgtacgtacgatcaaacgttgggaaattccgcatcgcaatcatattgacaaacatgcctaccgtctctttccactcctcttgcatccttcctgcaacaggcgttcctaccacaatgtcctgctgacctgagcggtgtgcgagaaggagattccacacacttagcattaccatatacatggatgcttccgatgaggaagccagctcatgcaagtgttgtgttaacgaacgattcaacgtgaaatgaagacgtcccccttgcatggatcgctgtgatggacgctcatggtcaagtggaagctccagcacaggtaaagaagggccaagatggtccagccagtatgtttgatgtgaattgtattcatttgaagcgagacgctgctgctgccataccgcgtaatctttgtactgcaatcggactgcttgctctttgccaaaatataaatcattgaagtcgcgagtgatgatttcgacagatgtaccatccgcgataatatggtgaatatcaaagaataacaggtgcttgcgctcgcctattttaatcagttcaacccgcataagcggagcactccccagatcaaaaggacgaatcaatgtctcaatcatcgcaggcaaatcttggtcatctgccacatgctgctctgcatagcccatacttaagcgaaccgaaggttggataatctgaacgatctgaccaccccgtatctcaaacgatgttctgagcgcctcatgatgctgcatcaacttctgcaaagcagcctcaactcttatacggtccaattcaccttcaataatggttgcagacggtaagttgtaggccgtattgcctggatcaagcatcgcttgtgtgaacatacgcatctgtgcagaagagattggatacgcatccatagtgggtgcagattgaatggtctgttggtccacttttggtttcgccatgacgtagagatgctccgccagttgaataggcgttgaatgattgaaaacatctgctacctcaggctgaattcctaaatgagaccggatccatgcagacaagctgactgctttgagagaatctcctccaaccgcaaagaaattaacctcttcatctagatcatcgatgccaaaaatcgttcgatatgcgtccaggacaatctgtttcagttggtctgaaccaccagtataaactgtcccttttattagagtagagccacttcccataccctgatctgcatgctgcctatcatccccggtacccattccttccactgctgatgagccagaaagagaaacactgacaggataggattgtttgttgaaaacataagtaggcagagagcatttgcgccgtaccgcctgccctttgagcaccttccagtccggttcaatgccttcgcaccataactccgcaagtctgcggttcacatagatactatcctgctccgtttcccttacgtgacgtagcatattcagtaccgtctgggaatctcttgatagactgtgctgtctggcaaaggagcttagcgttcgtcctgcacctacttcaattaatacagcccgttcatcctttaacacttcagccaggtttgattcaaacaacaccggctgtaaaatatgacgggaccaatagtcaggttgtgtgatttcatctacaagcgcccatgttccactggtgttggacagtaaagggatctgtggcgtatgaagtgaatgctctgctaaataacgtctaaattcctcagcggcctggttcatcattggcgtatggaatgcatgggaagtcttcacacgaatgcacttccagcccagtccttcagccttggcttccatccgtgaaatggcttcagctgtcccaccaatcacactggaacctgtagtattcaccagggcaagccacatgtcttcctccagttgtgacttcacctgctgtgcatccgccataatggcaagcataaccccgggttgttgttgctgcatcagacgtccgcgaagtcgaactaacttgacagcatctccgagttcgaacacacccgctaccgctgcggcagccaattcaccaatgctatgcccgatcatgccatctggcttgatgcccagatccaacagcgacttggccagcgcataacttgtcatgaacagtgcgaattggctgtactccgtctggtttattcgctcagggtgctgatccccgtatacaacagacagcatatcttctcgttcttccgcaggcagaaggtccaatatttcctgaatataacttctgaagattggagccaggcctgcttgctctgtagatctgtatagttctgcacccattccctgatactgactgccctgtccggggaacataaagtatacgggacgagtgccttgagccgaatggtatacgcgtgcttttcccagctgctgtatcagcttgtccggattatccttccatgtcttatccagaatgagtgccttacgatacgcaaaaacagatctacctgactgcaaggtccacgctgcgttcgatacagattgattcgactgctgagtcagatgttccataatccgttcagcggtgcggttcagcgagtactctgttttggcggaaaaaagcaatatatttacgtcatcatccggactgcacttctccatctcgggagcctcctccaataccatgtgagcattcgtgccccccacaccaaatgaattgattcctgcgcgcatgactccaacattgccctgtttccagtccaccccttgtgcattaactttaaaaggcgtattcaaaaaatcaattttgggattaggctgctcataatttgctgttccagggatataagcttgtccaagactgagcgctaccttgatcaaaccaaccacacctgcggctgtatccatatgtcccacattgcctttgaccgaacccagataacaaaattgcttttggtcggaagcaaaggcccgagttaacgagtttacttcaattggatcaccaagcaacgttcccgtaccatgtgcttcgatataactcaccgtttccgggtctactccagctaccttataagcatcctgaatgacttcagcctgtccgcttacgctaggagcaagaaaactgagtttctcttgtccgtcattgttaattgctgagcctttgatgaccccgtagatatgatctccgtcccgcagtgcatcggttacccgcttcagcaccacaattcccataccattggagaagacggttccactggctgccgcgtcaaatggacgacagtgtccatctatggagaacatcatgccatcctcaaatatgtaacccccttcattgggcaactccacggtaatcccaccagccacggccacatcacattctccaacaatcaaagattgacatgccagatggggtgtaaccaatgaagtagaacatcccgtcagagcggtataggccggcccttttaagttcagcttataagccattcgggtagcgagaaaatgattggtgctgagggtaaatgcttcgtatttactgctatagttagcatcgttaaaaagcacttgacggtaccattcgaagtcatcggacccaccaaggaacacacccaccttacccgcttcatccggtctgcagcctgcatcctccagtgcttcccatattccctgatacaaaagtctgaattggggagacatcattttggcttcaccgggagtatagtcaaagaaccctgcgtcaaactcatcgatgccgttggcacgtccttttgccttgacataacgaggtgaacgcagcagcgcttcctccacgccaagctccctcaattcatcatcactataaaagtgaatgctttcccgccgttcaacaaggttactccagaactcccttatatcttcagcgcccggcacattcaccgccatgcccacaattgcaatgtcctcacgcataatgccgtcttttcgttgaaacaattgttccctttcagttggtatccgaactccctcatcttttgatcccagcgccgcaaattgacgcaaagtcgggcattcgaaaaaacgaggaacagggaactccacatcggtataatgttttagtttattgtgagcctgaatgacagaaaatgaatttccgcccaattcaaagaaatggtcgtcgcgccctactctctcaactccgagcacttcggcccacacttcggctataaccttctcaagctcagaagacggggcggtatagaacgtactggaagcatgagcatgcgtgatatctgccatgagtgccttccggtcaatcttcccactgctattcaatggaaattcggatttatgtacaaaaacggatggtatcatatatgccggtaacaaacgagacagatgctctctcaattcgacagaaggcagctcctgctctgacagatagtaggcatacagcaagccggacctaccttcaaatgatttcatgactaccacggtctggatgacacccggataggatgacagggtattctcaatttcgcctgtctccagtctggctccttgaattttaacctgaaaatcaatgcgtcccagatattcgatcgtaccgcttgggagtgaacgtaccagatcacctgtgcggtacatgtacctgaaatgctctgcatcctgtccttcttgaaagaaaggattagggacaaacttctctcgggtcatctgttccaaattcagatatccacgtgcaagcccaacaccgctaagacaaagctcccctggaatacctaacggctgaagctcatcatgatttccgacgacataccatctggactcattgagcgggtagccaatcggtacattgcccaagccttcgtaatggcttaatggataatgagaaacccatatggtgcattcggttggaccatatacattttcaagacttgctccaatgcctaacctgttaaatttttcaatgatgtctggcgtgactgcctctccgccaacaaacatccatttcagcgtttccaatgctgacagatcggagcgaagctccatcgtttccagaaaaagacggaataatgttggaacaaagttgatgtgtgtaaccttatgtgatgccaccgtagatacaatacgagcaggatctttttctgctccaggctcaagaatacttagtgcgccttcacccatgaaccagccgaaaagttccgtggcggacacatcaaaggtatatgccgttttcagcaagtaaacatcctgcgcctgcatcggaaaacgacgctccagatcaagtagtgtattgactacgctatgattttcaaccatgactccttttggcttgcctgttgatccggacgtgtacatgatataggccaggctatgcggattcagcgcctcttcaagatttgagacatcccccgtatagacctgatctccctcaacgtagatgtactggacatccagagtctcgtcatctttttcgggctgcatagccagcactatggatatgtctgcatccgatataatataggcctttctggacaaaggataggaagggtctacaggcacaaaagcacatccggcttttaatacagccaatagggcaatgaccatatccgaggaacgtggcatctgcacgccaactgccgcgttatcactttttttactcgcaacgatctgcctagccaattgattcgcttttgcattgacctgcgcataggtctgatgctgcttgccttccattagagctacccgctccgggaaacgtgctactttatcgtgaaatatatccataatatgttgtggagtgtagggaaaataagaagtttgattgaatcggtacagtaggttttctttctcatcctgcatcaggaggctgaactccctgattttttgatcagaattggttactagttgattcagcaaatatagaaatcgttggcccattcgctccattgaatcttcacggaacaagctcggtttatattgcagcttcaactgagcaccttgcggtaaacgactcaacaccaccattagatctcctggaaacgtaaccttatcctgatccagaatacgagttccgagcatatcttcctcataggaatcataaacaaaggagatatcaaacaacgatggtgatccgggttgagcctgtaacatgctgtctctgacaatgaggttattgggatatccgatgttcctgtacgtatccatccaggttgtggctacttgttgcagcagaggttttagagttgattcgaggtcaatatggaatcgcataggcaacatatggacaaaacatccaatcgtttcttccaagtccataccgggacgatgagaatatggggaggcaaaggtgatatcgtctgtaccgacatatttactcataagaatgccaaaggcacccataaagaacataaaaacggttacttcattatctttggacatctgtgtaatatcagccattaacgattccgaaatatcaaatcgcagttcatgaccaatcccttcttgtacagaacctgctggaaagtcatgttttagagaaagaggttccgctcccttcattttgtttaaccagtattcccgttctttggagtaattgttttcgtgcagtttcttattctctgcctcaacataagagatgaatccttcatccagcttgacatccacaggctgatcttcaagaagacacgtatatgactgaataagtttgtttttcatcagttcaagcgacaagccatcacatattaaatgatgaatacataaggtcagaatatatcggcttttatccatctgaacaatcattatacggaacagaggacctttctccagctcaaaaggtgtcccgatgcattcatccaccaatgcttctaactgttgatcctttggattctcctgattctcgctacttagatcccacaaggcaagtgaataatccatatcttcatgaacggataacacgggtacatcattttgaatctcaatccgagtacgcagcaccacttgctcataaataagcaattcgatggattggcgaaatatctccatttgaagatgatcaaattgcattgaagctgagatgttatacgaagtgggatcattcacctgacaatcaaaatagattcccttttgtgtttcggaaagttcaacggttttttgtaccatcacgaccacacctcatcgtttaattgagattcaagctgtgtaaggcaaaaaatcagttacagcttagtgcattacccagattccaccagccaatacggagagaaccgtgataaacgtttgatacaccacatccataatgagattcccgatactgtctccatctgccttgcgatttttaatcatgacataagtatgtgaccaaagaccacttaatccgtatatgtacatcgttaccaatacaccaacccaaaagttcccttggaaccagatggccataatccccataactccaagccctacctgggaaaaaccgtatttaacctgaaatggtccaccaggccatcctaacattttggctgtctgatccgctctggcaatgttgacaacataaccaatcactccaaccaatccaaacgtaaccacaaactgatgaagcagcaacaccctgctaatctcgctcatttccccgggaaaacctaacacatataggtgtactccccctgaaattagacctaacaaccatagaaccaaaaaccacatgcctgtcccactcccgccgtttgttatttggaatcatttgtaactaaatgtacaatcttgtagttaaacacattatataatcgcttttacatttgtcaattaatacataattttctagtttgtcgaagcttttgtcatttttattcttctgtacgcaaacaagaaaaccatatagttccatttaacttgaaaataataggaatttagccctattattacattaaaaggtttgaaacctacttcttttttaacgcttcaaaagaaccacaactcatttatttgacataggtgatagttcaattatcatctgtttgattatctacgattccagaacaacagcaactatccattaaaatataatataaaggaattgacatccgatctctttgtaactattatagttacaacggtggtgattatcccatgagacaaatcagcagtcgcttttccattgcggttcataccctgtccctgatcgctgttatgcccaatgaatgcaccggagatgtgatcgcgcagagtgtgaatacaaatcccgtgattattcggcggattatgtccaagctgaaacaggctggactgattgacgtcagacccggtgtgggtggtgcttccttgttgaaagatccagccgacattacccttcttgatgtatatcgagcgcttgaggtcgtggaggatggggaattgtttaactttcacaaacatccgaatccgaaatgtccggtcggcaacatgattgaacacaccttgcgtgccgaacttattgaggctcagacagccatggaacagcgcttgaatcgtgtaaccatacagcagatgatggatcagattcatgtctctgaataacaaagctcattatgagctttttttaaccctttcgttgtaatcacacctgttataacaattttgattacatccatatgcaaacaaaacacatatcctaggaggaaaagaaaatgaaaattttggttactggcgcaacaggtcaattgggttcactggttgtagaggcattgttaaaaaacaattctgccaaggatgtggcagtaagtgtacgtaatccggaaaaagcggaaacattccgcgctcaaggcgttgacgtacgtcacggtgatttcgatcaaccagagacgttggagaaagcttttgccggtgtagatcgtctgttgctcatctcaactgatggtgacaatgaaacgcgtattcgccaacatcaggctgccattgacgctgccaagagcgcaggtgttggattcatcgcttatacaagcgttgtgaatgcagagaaaaacaccctttccctggcggaagttcaccgcgctacagaaaaagctattcgtgaatccggcattccgtattccttcctgcgcaacaactggtacctggaaaatgaagcaggcagtgtgcaagcagctacgcaaggtgcaccttgggttcatgccaccaacaacagccaagtaggctgggctacccgcagtgactacgcccatgctgcagcagctgtactcgcaggcgaaggacatgagaataccgtatatgaattgtccggcaaactacgcacgcaagctgaactggctgccattgttggtgaagtgcttgggcaggaaatcaacgtgcaaaacgtggacgatgccgcttacgccgacatcatgaaaggtgcaggtctaccagactttgtcgtatcgatgcttgttgatatgcaaagtgccatccgtgaaggcgcattggctgtagagagtgatactttagagaaattgcttggccgtccggctcagccacttagcgaaagtattaaagcaattgtaggcaagtaagttttgaatatgagaaagggacacaccaacaaatgttggatgcgtccctttttttggtttggtgtagctaacgatcaatacaacgatatccccgttgaacggatgactgtacactcaacccattcattgcgactgctgcaatttgagataggtatttatgctttccacaacagttcatcactcattgctcaccagtcactgctcactgctcactgctcaagaatataacgtgcaggaatgtgatcggccagccagatattttcgtttccatgataaaaaaggattccatctgtggccgattgagcagcattgattctcaaaatgacaggctgatcatcccgtctttgtcccacctgattggccgtatcaatatctgcggacagatgtacatattgcctttgccgcggctgtaagccatgttccataatagaatgcactgcgcgtgccggggtcccatggtacagggtttccggtggctcggcagatatcttcgatatcttatgaggagtcgaatgtccatacaatgcccggatgcggccagaacggatttcatgtctctttttctccgaggtttggatcatctgctccagatcggcttgcgtgacttccttccagtacggactttcatgtaaagccaccagcaattgcgagatttccacccaaccctcttcgtccagttccaactcatactcccatggtgcatgtcgcagagcgtatgagagttccttgcttaatttcatcagatccaatacaatcatctcccacatctaataaaactgtctatttttgcgattgaaccgcggttaaaatctcctgaatgttacgttccaatccttcatcgtcttcctgattgaattggcggtgtccatcaatcccacgttggataatcgtattcatcaccggatgaacctcacgatcggaagccacccgaatcagatcatcggcaaaatcaaccgcctgctgttcactgtaattaaatggtttaatcaacatccgaatgctcaaggcatgggcctgcggctccgccagctgatcccgatgagtgatgccatacaccgcgccaaaaccaaaagcagccatgacctgacgctccagttctgttgtctgttccaaaggcgtgccaatcagctcacacattttgtccaccatctgctccaactcgtttgctgccgcagccagaattacgtcattaatatcgtcagcgttgataaattcagtcatattggtttctccatttctgcaccgtatttgatccattctctcagactctatgagaacattgtatcggagttggggtgttcgtttcaaattctatctataggtggagctgttaatcacggcatgatttatcgtctggctaacttcgagacgaactctataaaatataacgtcattcaattacatccgattccctataacataataaataacaaaaaaaccaaatctcctcttttataagtcgacttggtttaatttattgtacgaatatgctcatctagcataccattttataaaagaggtggtataactcaagccatctcatgttgttttttcgactccacttcatagacctgcgtatgttcattctcggctaaagaccattccaccgttccaggtttacgcactttccatacccaggcttgaactcgtagcgagcttctgacccaagctaaggaagcacagcgtttctcagaacgaaccgtcaacccccaatgaataacacgagcgagccaaggattcacatactcattatgtgagcgaacagatggcaattcatcctggaacaaccgctgtttcacgtccataggaggttgcccgcatgtccaataatggagcagagctgccaaactatagatgtccgacatcggtccttgactggatttctccgaataaaactccagcggagaataacctgccgatgtgaatatcacctgtttctctccggattgcataggccaacgggtagctgagccaaagtccagaagtttgggtgtaccatcctccataaccataatgttggaaggtttcacatcccggtgaagaatgccttgcttatgtatgtaatccaatgtatccaccagtggaagcagcgtctccgttatgaaagcagcatcaagagcatgattatgttcattcaaatactcggtcaatgtgattcccgtgcagtattccataaccagataccccgtaccatttgcttcaaaatgatccatatacgatacaatatggggatgatccagtttcgataatagttcaccttcgagcagaaatgcagccagtaactcctgatattgcccaccgtatcctcgtgaagagcagaacacccctcgcttgtctgcctgccgttcagccattctctgtgggaaaaattccttaatggctacttttgcacctgtgttacgatctcgccctgcatatacaatagccaactcactgctggccaatacctgtcttacctgatatgtatcatttataatcacattgcgttgcaatgtcattttacaattgtcttttctcataacagacctcttttcaaccttgtcgatcggaagactttccgcgtaaatgcatcacttggtttaaccagtcagcaattcatcgccaactatacatataaaccaaatgatgcaatttgaaacaccttaacgcgaaatatttaaatattaatgatatcaagccttctgcgatatactgctaatccctatccacactactctatagaagaaaagcattctcttatatagagtatcgacagatggatgtaattactttattaaactggagaataacatttctcatccttcatttacagcttttattaataattattgtgtaaaaaacgcccgatttcctcgttcatctgaaccaatacgtcctgtgaaggaaaatgtccagtatcatacttgatggcttctacattcgtaataatcttttgagctcgctcaatacacttatccgcagggaaaaagacatccttctctcctaccaataacaaggttggtgacgtataattcaccagttcttcccgctccgtaagcttgggcagatcctgatctatgctgacgtatttaaaaagtttgccgataatgtttttatccatttctttcatgcagttgcacgacatgttgtccgtaattttttgcaaagaagatggtgaagacgtcatgcggtacttgacgagtggcagcgtgatatcctgagctgttttaattttggagttgaccgcaagacccgcaggagcaaccaatacggcacacgagatgcgttccggaatataggtagccagtctgaggataatgcctcctccaaacgatggaccgataaatgcactcttttcaatatcatagtgatctaacagatccgacacccataatgccaagctatcaaaccgtgtcgagatactcgcctcctcactataaccagggtgaccaatcgtatcaggagcaataatccggtattctttaaataaagaagagaaccatgacaacgtcatcggattcacacaattaccgccctgaagaataaataacggcttgccatctagaggacccgtcattaaaacatgcgtctttccaaaacgcgtctctacatactcccgagtaaatttctcacccaactcgttcaaataaatctcatactcttcaagtatgctgctcttgccttcttcacttctataaatggaactcatgtctgcctcctgcaatatatactcaaataccccattctattgaatggacttgctaatcaatggaccaaaaagataaagagggcctgcagatgacaggctcctccatatgtttaactaatcatattcagatgattatagagcggaaactggaaattgtaaataacgattctaatagaccagaaattaaggaggcatcctttggaaaaattcctacttccggccgtaatctgccttgatttcgccccactgtttggtctgccattttagcactttattgctgtacgtattcgtctggagccactgctcggcacgatcaatcatcaaccagatctcttccgtggagttgtctcttggcaacgttgtggctacttttttctgctttagccatttcatggcattgaccgagtcggtatacaccgttttggtactgccttcttttttcagatgtgcaagggcatgtacaatggccaaaaattcgcccagattgttcgtgcctttggagatcggtccgacggagaaaataacctcaccggtgcgggtgtctactcctttgtattctacaggtccggggttaccacgtgtgcccacatcaacagagacgctgtcgtaatccacttcctctgacgtttccatgccagcacttcttccgctaccagccgcctttgtcttcgacgctccgcctgcacttgaaccccagttccctttccatccagcacgatacgcttcttctgcggctgttttggactcataggatttatattttgctccagtataatgatccgtctgcgctttgcaatctgcccatgtgttatacacacccggcttcttgccttcccagacaacataatatttctgttttgccactgtaacccgctcctttgttcacttcatcaataccctattgtaaacgatctggtgggcggaatgaaagctatggatttggccatctgcataattcctccaactccagaacagtctaagaaacaaagcgcatactggaatagaaaggaatatacgtatggactggatatggaaatctgttttacttgtacttatcggcatgattctgctgcgaattgcaggtcgcaagtcgatctcacagatgagtgtcgccacaacggtcatcatgatctccatcggaacaacgattgtacaacccatcgcaaatcatgagcttggcaaagcgattggatcagcatcagtcttcattttgacattgcttgtagtggaacaactgcaattgaaatttaatatttttgaacggttaatgagtggcagttccaaaatcgtggtagaggacggaaaggtcattatcccgaatctgaaacgtatgcgttatacgatggatcagcttgagatgcatatgcgacagcacggaattacaagtgtagatgatctggagacggcgacggtggaacccaatggtcaacttggttatgtcctgaaacgacatgctcgtcctgtaacgattggagatctggaagagatcctacgaagttatgcgattacaggtagtagtccagcaacgggagaacacccccaacaagacaacagcagcaagtcttcaacgcatagcgataattcctcagatatttttcaagaagtcagcaaaggtgctcatgctcatcccgttgatcctaagcttcaatagttaatccctaccccacctaaaaacaaaagaccggccttgcgagcatgcaataacatcgctccaacaggcacggtctattttcacttcaattgattatttcgaaagattgctccaggtcatccaaacgaagatatagtcccaatcaacgtgtactcaggtaagcaatgcctaagccgcccgtaactggatttgtatagatttcacaatcgacatcgaacacctcaccaatcatctcgcgagtcagaatatcagccggtttgccatgaaccacaatctggccctttttcactacatagagataatcgcaatatgctgccgcgagttcgagatcatgcagcgctgccaatatgccaatcccgagtccacggacaatatttagaatctgaagctggtatttgatgtccaaatggttcgtcggctcgtccaggatcaggaattggggttgctgtgccaagacacgcgccaatacgacacgctgtttctccccaccagacagagacacgtaattgcggtctgcatgtccagtcagatgtactttttccaaagcctgctctacgatttcatgatcccgttcattatccgtctccagcatttttttgtgcggggtacgacccatcatgaccatctcgcgtactgtaaaatcaaaactcaattcattaaactgaccaacaacgcccatgtgtctggaaacaagcttgggactggatttgagaatatcggtattgtccagaaaaaccttaccttgctgcggtttgatcactttataaatgctcttgagcagtgttgacttgccacaaccattgggtccgatcagtccaacgaactgtttgccgttcacctgtaatgaaatatccttgatgatgtccgtgttcagcacagagatggatacattttctacgttcagcttcatgtttaatttcctccaaaaccgtagccttttttgaccagcatatacataaacattggtgcgccaatcatggccgtaataataccgattggcaactccacgctggatatgagggatcgtgcaataacatccgtccagatgaggaaaatggctccaaacagcacggatacaggcatcactttacgatggtcggaacccacgagacctctgacaatatgcggaataatgaggccgacaaaaccaatcatgccacagctcgccaccataacacctgtcaccaaagcggttaacagcatgtacaccctgcggtacacactcagattaatgcccagcgtaacagctgcttcatcccccaataacatcgtattaagaactctggactgtaaaaggaaaaatagaatcgccaccagcacgacgatacccacgagtggaagcttgttccatccggaagccgccaggctgcccatggtccagaacgtcaccgttttgatgccttcagcattgttggcaaaataaataataaagttcgaaaaagcgctacataacgcgttaatcaccattccggcaagcaccagcttgaccgacgtcattttcccccgaatccctgccaaagtcaggaccagtaaggacgcacccatcgcaccggcaaaggcccagaaagccacccccgtctgaccaagccacccaatcgcaccgaatccaatgagaattgcaaaggttgctccaagtgaagcgcctgaggatatacctagtatgtaaggatcagcgagcggattctgcacagcagcctgcataacagcaccgcacaaggccaagcctgcgccgataaacatcgccatcagcacacgcgggaaacgaatctgccaaatgatatcggtaaaggaacctgcctcaatgggtgttgtcccccactgaaatcccgttaatttggttaaaagaatacgatatgactccgccagtggaatttgtacctgtccaatggaaactgcaatacctacggatataagcgtaatcatgattaaagctgcaatcagtaaagcaaacccggatttactatgaatcagagactctcttttccccatacgctgtgtctgaaccgtctgtgccatctcttcccccatcaattcgcgtaaaatgtagaacaaattaaatttagctatttacaatgtgttttctcggattataattgagaatgattatctttgtcaatttaaaacacatagaaaaggggttcatcatttaatgaaattcacatccagaactattggcttcgctgctctaagtctcctgttactgctgcttgcagcctgttcgaatacttcaacttcttcccctgccgaagaaacaacttcacctactaacacgacggaaacttcagctcctgctgagaatacaaataaaacgacgtacccgctcaccattgagaatttcacgatctcgggtgaaggcggcgagtggaaaccaaaagtgcaagtattcgataaagcacctgaacgtgttgttgcgaatacccaatctgcggctgagatgctcatcaaattgggtctgaccgataaaatggtcggtgttgctgctctatacggttccgttacacccgatgtggctgatgatttcgccaaaattccggtattgtccaaggattatgtaggtaaagagctggttgtaggcgcaagcccggatctggttctcggacggggcgacctgttcgctgatgcagactggggcgtgggtaccgtcgatggattgaatgacatgaatatctgcacgttcctgcaaacgacgaatcacaaaggctcacttgatagcctgtatagcgatattgcacaacttgggcagatcttcgatgttcaagaaaatgccgcaacattcacggaaagtctgaagactcgtgttgcaaccattaaggcaagtgtagccgatcagcctgatcatacttttgcttatatcgtacccgctacggaagacaccattacggtcagcagcatgcagaacgatacgtatcagcttgatgcacttggcctgttgaagctgaaaaatacgtttgatgatgtgcaaggtgaggtaagtgttgagcaactgatcacagcgaacccggactacctgctcttgtccgcgtatgccggttcaccggatatcgataagctaattgagaacctgtatgccaaccctgccctgcaaagcatgaacgcgatcaagaacaaacaaatctatgtgacagatttcagccagttctggggatatggatatcaaatactggacggtattgagaaaatgggacaggaaatgaaagctaatccaatcaagtaatgacttgagccaatgagcaggagaagacattctcactgctcttttttcagttgactttagaacatactaaattaacggataaactcacaaattaaattaaaaatcatgataaaacctccttctcacctttaatcctgtatgcaaaagtttgattttttcagataagcttatatgcatagttctggataggattaaaatataagaaatgaggttttattcatgaccgctcacacatccctcccaaaccaaggggagattccttccatatcttcaaaacgccttccgtgggctgggcttcttgcattagccatggcgggatttatttgcatcctcactgaaagcctgcctgcgggactgctgccgcaaattgcaaaagacttggggatcacagaagccctcaccggacagttggtaactctttatgccattggatcacttgttgctgccattcccttgactgctgctacacgcggatggagacgccgacctctactgttagtatgcattagtggttttcttgtctttaacaccgttaccgccttatcttcggattatatcctgacacttgctgctcgtttcatggctggagtctctgcgggtgtgttatggggcatgacagcaggttatgcacgtcggatggtcccggattcgctaaaaggtaaagccatggctgtggctatggtcggcacaccgttagcattagccctgggtgttccaatcggtagttttctcagttcttatgtcggctggcgcctcatcttcgggatggtatctcttctaaccgtggctttaatcgtatgggttctctggagaatgccggattttgccggagagccagctggtgaacgtcttccgctgcataaggtgtttttaattccgggagttaggcctattctgtttgttgttctggcctggatgcttgcccataacatcctatatacctatatttctccctaccttgcccagaccgcatttgctaacagagtcgacttgattttgctcattttcggtattacttccattgttggaatttggttaaccggaatgctcattgaccgatttttgaggagattggttatcattagcttggcatcattcgctctggcctctgtcgtgatgggaatcgctactcatcaacctgtgattattatccttggcgtcatgatctggggacttacgtttggcggagccgcgacactgttacagactgccatcgctcaagccggaggcaaaagtacagatgtcgcccaatcgatgctggttacagcatggaatctggcgattggcggaggaggcatcatcgggggcatccttcttgagctatttggagcaggatacctttctggggcgctgtttatcttgcttattcctgctttgcttgtagctatgcgtgcttataaatatggatttaccagagcaaattaacaggaaggcattttgcatgagttacacgcaggaggaaagaggagttcacttgatgtggactcctcttctgtttttcattttaaagaccagaatcttattctgcctgtgccaacagatttggtccttccactagattcttatgtgcaattggagaagacatggtgattaaagtcatgtaagtaccgtacggatcacacttgttctgaaactcctcgagtccctgaatggtatctgtgaggattttcagcaagtaattgtactctccgcttatccgataacattccacaacttcaggtgacgcacgacagaaatccaggaaaggataacaatcccgcgtacgaaaaagaacataggctgtgctctgcttgcccaatttggatggggagattacggttcgatattcctcgataattcccttttcttccattcgtttgactcgttcagtaacggcgggctgagataaccccaccagtttgccgagttcggtcatggataatctcgcctgattctccaagtgatacagaatatgctgatctatttcgtccatgtgatccactcctttaaatacataagatatattcagaaatcaccttaagtatattcgctaattcattataatgcctttaacaaaccatgtaatacaagatcaatcatttatataataaacacagttatcatgagaaatcaaatacatcagttggtgagaggaagataaacatgagaaaaaaagacatgacgacattgcataattgtgtggatgaagccattgaccgcgctctaagcgaaaaaagaattgtaggaacagttgtacaggttgcattaggaggggaactggtatatagccgggctgctggtttcgcagacagggagcaaaaacgcaccatgtcggaaaacgctctgtttcgacttgcttccgtaaccaaacctattgtctcgacagcagctctggcattaatctcacaaggaaagctgagtctgcatgatccggtgacacgctggcttcctgcattccggcccaaacttgccaatggtcaggacgctttaatatcagtacatcagctgatgacacacaccgcaggcttgacataccgtttcttccaagaagatcagggaacctatgagcttgcaggagtatcggacggaatggattggtctgaaattagtctggaggagaatctgcaaaggctggcttctgctccgcttctgtatgagccaggcaacatgtggagatattccattgcgacagatgtacttggtgccgttatcgaaaaggtaactgggatgtcactacgagaagctgttcaaacgctggttactcatccacttcgcatgacggacactgactttgttgcggtggattcggaacgattaacagccgcatacgctaatggttctgaagaaccgcgtctccttcataaggagttggagcagattccttttattgagggtactgctggcttcagactgtcacccaatcgtgcgaatcgtacttctgcttacttatcgggcggagcgggtatggttggaagtaccggagattttcttactttacttgaagcattacgacaaggaggacagcctctccttacagaagccgttgcggctgagatgtctaccaatcaaatcggtgatctcgtgatgccatactggccaggaagagggtttggccttggttttaccttacttaaagatcctgtcgcagccggtacaccagaatccccgggtacgtggcgaatgggtggaacttacggtcattcctggtttgttgatccaaaagaagaacttagtgttgcagcattcaccaacacggcacttgaagggatgtctggccagtataccaccgatatctgtgatgccgtctacgcgggcattcgtgaaggcaaagaggctgcaagaatataaatacgaataaccgcccaatttcattgggcggttttatttggcaacgatggtaagactactgtctgttattactcaaatttttctttttgagaaggtagatccccgcaacaagaataaaccacactggcgtgacaaacagcgcaacacgcgtatcctcggccaatgccaataccactagcacaaacgccaaaaacgccaggatcaagtaattcgaagacggatatagtggcagtttgaagcggctacgactcgctagctccggctgagtacgacgatatctgagatgacagatcaccatgatgccccatacaaagatgaagcacacagtcgacacactcgtgatcagagtaaatacaccctctggcatgatatagttcagcacaatcgcgatcagaataacaatcgtggagaaaaacagcgcgttggaaggaaccttcctgttattcagtcgtgcaaacgattcgggtgcgttgtgatccttcgccatggagaacaccatacggcttgtactgaaaatggcactgttacacgctgacgctgcggaagtcagtaccacgaagttcacaatgcctgctgcggctgcaatacctacagcggcaaacacttgtacaaacggactttcagtaggcacaatggcgttccacggataaatactcataataatcagcagtgcgccaacatagaagagcagtacccggatcggaatctggttaattgctctcggaataaccttctccgggttctccgtttcccctgctgtgagtcccaccagttccatgcctacaaaggcgaacaccaccatctggaacgatatgatgaatccatgcagtccattcgggaaccatcccccatgactccacagattggtgaagctcgctggaccctgatccgtggtaaaacctttgaatatcatatataaaccaacaacaatgagtgcaaaaatagccacgactttaatcagggcaaaccagaattccatctccccaaacaacttgaccgttgccaagttcatgattagcaaaatgactaacgcaattaaccctggcatccactgaggtacattcggaaaccaaaactgcgtatacaaaccaacggccgtaatatcagccatggcaatggatatccagcagaaccaataggtccagcctgtaataaatgccgccatattgcccaggtaatcacgcacaaaatcgataaaggaatgatactgcaagttgcttaacagcagttcccccaatgcacgcatgatcaggaacaacacaacacccgtaatgatgtaggccagcaagatggatggccctgtcagctgaatcgttttgcctgccccgagaaacagacctgtaccgatcgcacctccgatcgccatcaactgtacgtgcctgttctttaatccccttgttaacgtttcttgctgcatgatcaaccaccactctctttctgtacatgctctctacgatgcaaaatattattactcatcatataataatctgcccagaatacatatccctcttttatatatttttttgcaaaagcaaagaggccacctttgtaaaagttgaccacttcatatgctcctatttcatgcccttggcacttattaatcttaagttgcatccgatccatactatcatcagcctatgtacattcctttgttattctcatgcaatgtcatgctgattatacatatctatagaagtattttaaaataaaagccaagcatagagcggcaacaactaaaaaggtaatcgctaatgaacgttcgtttttccaaattcgaatagcattagcaacactaatcatcaataacgcaacaaagttaataacactcgaatacgattgaaacgagttgaaaacgatcatcataaatcctacgatccagattaacaaaaaccacagtggagttttccgaaaaagctgcttcattatgatttactccttatatattaaattggtctttgtattagatattcttcaacagggatgaaaatccctttatttaggttataaacccaaattcttaatactattcagaccccattctaagtattttcacagtaaaaagggctccgataaaggcgccctctggtgtgttaatctattcctttttcttttccaatctgttctgaggatatcaattagtgtaatttcattgccctctttgtccgtgccattttcagagagcgcggtgtatcaaattttcgatcttaatgcatctccctacaaatgcggaaggttcagaaagcaccatctttttaacgaaaagcgctatctatccaacaactacttttgcttataaaactcatgatacaatttcattaacgctcgtttctcaatccgtgatacataagaacgtgagatgcccagttccttcgcaatttcgcgttgagttcgttcctccccgcctgcttccaggccaaatcgaccgatcactacttccttctcccgatcatccaggatgtcgagattacgataaattttgcttttttcaatcttcagctgcactttatctacaacgtcgtcggcttctgttccgaggatatcgatcagcgtaatttcgttgccttctttgtccgtaccaatggggtcgtgcaaggatacgtctttgcgtgttttcttcagggaacgcaaatgcataagtatctcgttttcaatacatctcgccgcaaatgtggcaagcttcgtacctttgccttgttgaaagctttcgatggctttgatcaaaccaatggttccgatggaaatcaggtcttcctgatcttcacccgtattgtcgaacttcttgacgatatgcgcgacgaggcgcagattgtgttcaatgagcagattgcgagagtgagcattgccttcagccataaggcgcaaatgtttggcttcatcaccctcagccagtggctgggggaacgcattatttttgacatacgagacgagtaacgttaactctttaatgaatagagcaattgcggtaaacaatccgggcacagatgacacctcctgcagttttacaacgatctggcctgagcacatgtgggaacagggtcgatctattgtatgtaggcagtggcccagaagtgcacgtacacttgaaaaatgggatgatcttgcgaagatttcacagactcacagaaactatggagcccacccgctgaagcaggagaaattctttttccacactttcgataaaatacttcttttccccaaataggacaacatcattctgggctaatgaaacatcgcttttaaaatagatcacattgtccgtttcccgaaacgcacctttgtaatagaacatcctatttctctccttcatgtatctacctatgtaattaactacccgctccatgtggatctgcttccttcatgctaacatattctctctcattcatcatgtcatattcgcacactaaccaacataaagccccagccctgtgcagaacagaactgaggctacatatcgatatgaattcctgtttctcctgtcgattgcttcaagaagctaattcaaattaaattatttgaagattcgttgtgagaactgatacaggccgctgttccagacagatggttcatgtccacctacatccagataaaaggtatgcggaatgttcatgctgctcaagccgtttttgaaattctggctgacccataacagaccatcactcgatccacaggagatccacaacaatttgagttggctagcgacttgtcccgggttggaaaccagctgcgatacagattgcgtattcggtgcagccgagaaggcccctacccaagcgaaggtattcagatttttcaatccgaagttaagcgactgcccaccacccatggacagtccggctagcgcacgactattcttgtctttgtacaccggataattggcctcgatatgaggaatcagatccttgagcaggtcttgctcaaaccgttcaaacgcagccactttgtccggagcaaaaatgtcaccgactggacggtcgtccttcatggcacggccattcggcatgacaacgatcatctgggacaacttaccttcagaatacaggttgtccaaaatgttcttgggtttcattgcattgacccactcatgctcatccccgccgatgccgtgcaggagatacaagacgttatactttttattcggagaatatcctggcggtgtatacacggtcgctttccgtgtattgcccaccgttgtggagtaataggatatcagattggtatttccgtgcggaatattgtttcgatagccatcaaaacccggtggtgccggcaccaccggagtattagcaagcgcattgtttgcgtcattgccggatacattcatagattcatacgctgtgttctgagcaccaacctcgctggaatccgtagcaaaagccattgttggggcaatcatggcaacgatcatcgaaagacttaaaaggattgtaatacgttttttcatctcaatttctcctctcaattttgtcaaacttaagtatgcgtttctcgaagtttcactggattacgcttgatgctgaagttcaactttttctaacgcggtgaagcaagctccctcttaacccaaaattgaaagcccttacaagaaacaggttagatcacctcccttcccttcagaaaaacactgaaacatgtagattccactctgttttcccgacacagaattacttatatagtatatttaaacttatttatccattttttgcaacaatattttcatttctagcgattcaattcaatgatcttatagcatcagagtttttcttctttcttctttattctcgaatcataatttaaaattgtaaaatactgttgttaaattgaatattttaccttattatagcttccataggggggtgtctatgaacaatttcaatagattcataatatttttcttctgagatatgcttacgcaaaagtttcaacgtttcggccaccaatatcttttgcaactactttattttctgggaggaaaatgatgatgttcaatgtacgcttttcgatcaaaaaagcatgggcttcattcctggttattacattattgctgcctttacttgtggggttatggccatccaatgtctatgctgcatctaacaatgaaggaaaaatatccataaccgcagatgatgaattcacactttttataaacggcagacagacgggaaaaggcaccgactgggccaaagcctatacgttccctgtgccgattcaatctggcatcaatgtgattgcagttcaagcgaaggatataggcctctatgcgggactgctggcagaccttagctacggagatgagaatctggttacggatttcaactggaaagtatctgaacgatatatcgaaggttgggagcaacccaaattcgatgattcgtcatggtcacgtgctactgacttcggacggtatggcagtgatccttggaaacagattagtggcatgcctgaggagaccagtgcacgctggatctgggcaggcaagaccaatgtgaatgctccagtttcagaagcatattttcgaatctcatttaacatctccgaagatggactggctattagcaatcccatttcttcttcaggtcaattcgagcaagtcgattatcaattaaaaccaacccaacccatgcctgcttccatggtgaagagacttcccgtggtaaatgccgtctttgaaacggtggaagagaaaggttcaatagaacttagcacccaagaggctgcccaaatcggtaataacctagctcctggtcagatttttctcgatcagtcctctgcccgggctatcaaagttacaagcgtcaatagaagctctggtggtatgcgggtagattacaccactccgggtgtggaggaattgttcgattactatgatattcccgagcaggaggtctcgttcgaagagcgcaatatcgtcatgcctgatcctgagatggtattggatagcaaggaatggcttgttcaggaaaccccttccttgttagagaccgatatagctgacgatgctgaaatgcgacagttcaacatcgacaacacgattcaaaatgatttggatgcaaatacggacatggttgcggatgcggaaacaatggatatcgcttccacggatatcgcacccatggatctgaatgatgtgaattccatggacatgaatgatacaaatgatatggatctgaatgatgtgattcgtgctgctggagcaggtgattttgccaattgcaaaaaatccggcaatgagtttgtctgtgatttcaagaaggtacttgtaaatcaacaaaatgcaaacggtaacaaagtgttcgttgaagcaggtggcaagctcaccttgattgcacccaaagttacggggaaatacggattttggggaaaatatgatctgaaatttactgctggtgagaaagccaacatctatatcaaaggtgatgccaagttcaaaaaagaggtcaaagttccaatcatgggcttcaacattggtgctggcaatctcggagccgtatctgtcggcgtttttctggtcattggtattgacggcaatgtcacctttgaatttcaggtcgatcagggatacacggttactgcgggagtcaaagggaaaacacgtgtctttattcccgtgaagatccagccttacagcagtgtgaacagatatcttacggtaacccataaaattgaaggacagatcactgcttgggcaggagccaaagcggaagtcggtctgaaaattgccggcaaaaaaatacttgaggtaagtgtttttgccggcattgaaggcacagggaaatggacaagcagcaataatgtgcccagtaccatgtctctaaagattgatgctctcgtcaaaggagaaggagctgtatttaataagtccttcaaactcttcgagttgcgctggaatttggtgaatctggtgaaaacccctaccaatccgggaaccggacagaacctggcacgaaatgctgccataacggtaacttccacctatcccgggtattcagcagcccgaatcaatgacggggatcgtaacacggccttgggggaaagttatagctgggccaataaccgtaattcctcacttccccaatatgtcgtcattgatttgccggcatcgagttcaatccagcgaattgatctgtataccacacagggatacccgcttgccaattatgatctgcaatactggaatggctcaaattgggtgaatcttgtacagattacaggcaatcaagagttaacgcgttcacacacattttcagcggtcagtacctccaagatccgtgtcgtagcgagtaaaggtccttcgcatcagccaacctatgtgcgaatcaatgagcttgaaatctattaaaacatcatgcccaaaaagcctcagcccctggttacacaggatggctgaggctttcttgacatctgtttagtgtacggatactggattaactacctctgcaccctcgggtgaagccagtctgtctttcatcaacagactgatgaacaaacccaacaaacccagtgcagcaattactgcggcatacaaaggcactgagataagtcctgtatgcgtaattacatacccacccatataggcaccagcggcatttcccaggttaaatgccgaatgacttgaggttgtcgccagcagcggcgcttcgcgggtcatattcataatccgaatctgaagtcccggcataataccaaacgcggctacaccccagaagaatatggtgattaccgcgagataaggattctctagtgtaatcgtaagtgcagctaacagaacagctaagatcccaaagttgacgattaacgaaggcatcagcttccagtctgccagacggccgccaaccaaattgcccaaggttacaccgaagccaaacaacaccagaatccaggtcacactttgctctgcaaagccgctgatatccacaagcatcggcgtaatataggtgaagactgtaaacaaacttccgcaccccaacgccccaataagcagaaccagcaacacttgtggacgaaccagattccgaaattgctgtccgaggttcgctggtgctccttgcggaaggacgggaatgaaacgaatgataccaatcaacgaaatgatgcccaagatcgtaatcgccccgaaagatgaccgccatccaagctgttgcccgataaacgtaccaaacggaacgccaataatgttggcaatcgttagccccgcgagaacaaccgataccgctcctgcccttctctcgggcgcaacaagccgcgtcgccatgattgaacctacaccaaggaacgtaccatgagcaaatgccgttaagatccgtgctgagattaacaacccataggtgggagcaatgacagacaatgcgttcccgataatgaaaatgcacatcagcagaaccagcagttttttctgcggaatcttgtgtgtaaatacggtcaatatcggcgcacctaccgctacaccaagcgcatatcccgtaatgagttgtccagcctgcggaatacttacattcagatctgtagctacattaggcaacaagcccataataataaattcagtcatacaaattgcaaaagctcctatcgtcaggcataacagggataatggaaacgctcctcgtttacctgacggtgaaacctgtggttgtactgtgtgtccagtcgtgctcatagatgttctcttctcctgtctgtctctttatcaacgattttctatcgccttcaaccacaaggcatctgttagttgttcgaacgttccacgcatggccagcttgtcccgccagtgtgccggaataccactcaatccataataagcacctgcgatctgcccatacaccgcacctgtagtgtccgcatcatcacccagattaacagctaacaacgcaccttcttcaaagcttgatgacttatgaaacgcccatagtgctgcttcaagtgaacgaaccacataaccactgcccttaatttccggcggttctttgccctgataggaacccataacaacctcttcaatagcaggcgaaaaagtaggttcttccctccactgtctgcatgtctccggcatcagcatgacgctcttgtccgctccgcgcagaccggcaacaattatggcggccagcacttcacatgcttccacgctttccgttgcagcatgtgttgtccgggagctcagcccagcatagtggaccgcctcgtttggttgattagcgtaagccatcacgacaggtgcaagcctcatgatagagccattgcccgctgtcatcgggtcaattgatccgctgtaggcttctccagttatctcaaacctctccaaggcacttcttgtggccccgccgatatcaaagcaatcgcctgtgctgctcatatacccgaccttgtaccaattggtgtatctgcgcatctgatccgcaggatcaaagtctgccttgcgtaccagactttctgccaggcacagagccatggatgtatcatctgtccactgccctgcctccagcccgaatacgccgccgcccacgatatccgttacgggttcaaatgtgcccgggctactgaattccacggtagttcccaacgcatcacccgctgcaagcccgatgaagcagccattgaaacggtccttttgcaacatgcttgtcttcctcccttactccatatactttcacaatctttcttccattctcccacagggcctgatctggcgtaaagctaataaaatccaataaattaagctccatttcttctattataaaagtgtcgaaagctgttgaacggtcagttcatccaattttcataaaaaaagttttatttttttgaactgaaaaaacggtttattcagtacaccgcttacatgtaaagggcttaacgttttgcaacgtttatcactttctgaaaataagtcatccatgtgaaaactttcaatgtaaacaatcatgacgcgcttgacccttcagtttgtcctatgttacggttttattagcttcaacgcatattttttcccaaattaatattcattttcgatctattgcgtcaactaacattccgcaggttaatgaatatacgggaatgaatttgcagaaaattttcattttttttattttaaccccaaactaattctgaaacaggaggaacaaatttatgattaaggcactggtgtttgatttcgacggaacgattattgatacagagacagcatggtatattgcttttcgtgatgcttacaaggaacacggcgtagatttaaccctggagatgtattcacaatgcatcggtaccagtctgaaaacatttaatccgtatgagtacctcatcacagatttgaatcttccgatcgatcgggaagcgttcagggaatccgttcagttgcagcacgctgcattgatgaacaaagaaaaggtgcgtcctggtattcaggaatatcttgaacaagcacgtgaagccggactgaaactggctgtagcatccagctccaaacgggagtgggttgaacagcatctggaacaactgaaactgaaagattattttgaagtcattcgtacggcagatgatgttgcaaatgtgaagcctgacccggaactctatactcaagcacttgaagcccttggagtaactgcagacgaagccgtagcgattgaggattcacctaacggcgcgcgtgcagctgctgcggctggtatgcactgcgtagtcatctcgaataccatcacaggaacactggaattcgatatgcctcaccaacggctgtcttgcttgactgaccttacatttaacgatttgatttcgaagccactcgtcactaccgtctaaggtctgcacgaatttcgcgatttaatccttaaagggggagttcacacatgaaagctgtacattttggtgcgggcaatataggccgcggttttatcggtcatatgttgtccgcttccgactacgaagtctgctttgtcgcacgtaacccgaagaaaatctccatgcttcaagagagacaggaatatccgattacacttgccaatagagatcaggacactacgattgtcaacaacgtgacggctattaatgtgaatgagcagaatctggttgctgaagagatcgcttcagccgatgtgatcacaaccgcggtgggtgtatctgcactcggagatatcgccgaaccgatcgccaaaggcattcaacttcgcatgaaaaacaataatcaggctccactgcatattatcgcttgcgaaaatgccatcggtggtagcaccaggttgaagaaacgcatctatccatttctggatgaacaaactcgcaataaagccgaacgttatgtttctttccccaatgcagctgtggaccggattgttccggctcaaaaccacaaagacccgctgcaggtcactgttgaacctttttacgaatgggtcgttcatcgtccagcacttctggatggatttaagaaaatagatggcgtccactatgtggattcgcttgaaccttatatcgagcgtaaaatgtttacggtcaatacaggccattgtgtcgccgcatacttcggctatctcgaaggattcaagacgatccgacaggtgatgagtaattccaccctgcgggccaaagtgcgccatgttatggaagagaccggtcagatgcttatccagaagcacgaattcaacgctcagaagcataacaaatatatcgataccatactggaacgcttcgccaatcccaacctgacagatcaggtcacccgggtcggacgttccccccttcgcaagctttcgcctcatgatcggcttgttcgcccagcgatgcaggccagtgaattcggaattgaaattcctcatttaacttctgctatggcggccgcaatgctgtttaatgacaaacgcgacgaggaagccatgaagctacaacacatgattcgcgaagatggcgtctccgccttcatccgtgaacgcatgggaattcccgacgaacatcccgttcatcagaatgtaatcgcccgttatcaggaactcagaggacgcaaggaatcgaccatactaacctgagtaacggatcagggcatgggttcgatcctgcaaactgaatagaagaacggccaagaagccgggaggaacctatgcagctgcatcgctccttccggctatttgtctatgcacggcacggtacattctatctatattgtagtaacgttaataaaacagcgtatctcctctctcaaggaaacacgctgtttggggaatctttttaatttaattttctactcattcataatggaattgagggatgcatatgccatgggcaggaaaccttccgaaggttcaccaataggtgcttggatgtggaaaatgaaaccattgccgtccagttctttgacaataaagtactctgttttcttatcattctgggacatcatgtataatcttgcatccttcatcgggccgttgctgagttgttcagccgttaactgcttcacttctccggtctcgaacaactcttccttggcatccatcttcagcgcatccagattgtaattcgccggcagcttctcaatctctacctcataatccggatcaatcttcattgttaattcatggtcttcggcgtcaaaagccatcggttcaaacacataaagtgaataacctttcgcttgtgccaatgtcactggacgtttctcggtcattccttctaccgtcacttccagctctgatgtcttcggacgatcggacgttactgtaccgcctgcattggaaccgttattgtcatcactcgattcaatctttgtaatctctgtaagtaccaactgtttcgttgttgcatcaatcgttttctctacatatttgaaacgaacggaatcttcgtcatcgatatcatccagagacttctgcagatcttcgctcacctggaatgacatcggcttctcattcactcgaatctccacggtatgtggatcagcccatccagtcagaataccttctgcttcaattgtagcactttcatttggttgttgctccggtgctggtgactgttcttccgtattattcactgttgactgtgcagcaggattactgttcccacaagccacaagcgagaatcccataagtaaaaccaggagtgatgcactgactttcattgtatttccttttcgcatatgaacacctccgttagcttatacgcaatgatgcttgtccatgttgcttctcatccattggcttggctgtatactagtacttacacgggagacaggcagctcaatcatgcaaaatgtctgaatggttgctcagatcctctgctcagctggcctgatccatctgtaccagtttggcattggctccgttaaacgctttggtctggaggttaaattgctttcggaattcagcaagcttcgcatattcgctattccgtacccgaatagctcgcttaatcttaaccagattaggttctgcactttctctcatcagatcatacaactgctcatcggcactcagactcaactgatacgaagcaacaaaattttccaatgcacgtgctcttgcttcatattgatccagcaccttttcagcctgtgccaacgtttcttctttttcaaatgatagttctttcaatgaactgcgcagggccactgtcttctcgttggtctgtttcatggcctcttccgcctgtttcaacaacgttcttcgttcatgaatatgacctaatgcctgatccagcagtgcttcgagatcactgtttttgttcttgcctttgtctaaaatagacttgtataacttcatatcttcctgctcatgactggtcaacgtcttcaaactctgatcgatctcctgaccgctgagcaccaattggtttatctgatttgccgcaggctcctgcggatctccacaaccactcgccagcagaattagcaatacactaactgccgcaagcgccacttttttactcgttagcaccaaagtccttcctctcttgcatcatcttgttgttatattacaagcgggtatctccgctaaaattggctacccagtgtgcatccggatcgtatacttcgaactcgtaaccccgatcttcgagtaacttcagaatgcgtggtaaagcctgaaccgtctgctcccgctcatgcatcagaatcacttccttatcccgatgtacacttttgctcacccgggccacaatcttgtccggctgacctggaagattccaatcgagtgaatctgtcgtccagtcccacagtttgaacccggccgcagcaatgtcccctctgaacttttcaccgatctgtggactgctgccataaggtgcacgaatcagatgaggcgtaaaaccaatcaggtcttgcaccatcttctgctctttcttgaactctttcacaaagttcgcagagctgccactcttatacagctttttatagttatgcgtcatgctgtgaagtccaggataactgccttccttcaccagccgtttcactgcttctggatgctgattcaactgacgtccgatcataaaaaaggtagctttcgcctcatgctgcttcaatatatccagcagttgttccgtatattcagttggcccatcatcaaacgttatgtatgccaatttgcgaacctggccctggaaccgtgccggctcctccttcgcatccggagtaacttgtatcatgccgagcttggccggctgttcgattacagtaatcggaggcggcgccacaacgcttttgatccaatgcgtcatgccaaagaatacatatgtaataccggtaacgaacagtaccaagagcattagagctatgactacccttccataccggatttttcttcgtttatgtgttttcgtgcgacttgtgctaggcggaatactgccacgctctcccgctctctcttgttgaactctcactgtcatgccacttccttactttcattttttcccgattattggtatattatctcgtttcatgtctctatatagaagattaatagaaaaatggatcgggagaatgacagaatagttacaagcccggttacaatctacttatctcttcattctctttatctttcctgcggttgtcttctcctgtataatgaagtgatttacgctatcagacttcaagaaggagctacacccatgacaagcttgaaccgtgccggcagatccatctatctgttattctttgtcggcattatcgccatttctttttcttcgatctttgtacgctggtctaccgcagatgttgcggtcattgccatgtaccgtctttttctcaccaacctgctaatgctgccgtttgtctggaaatacagacatgagatgatgcgtctaagcttacggcagtggggcttgctgcttgcatccggtgtgatgctggcccttcattttctgctctggatgggttcgctacggctcaccagtgttgccagttccacagttattctcgcgctggagccaatactgattcttgccggttcggtatggctgttcaaagccaaaattaaccgcatgatgatcatcggcatgggcatcgccctgcttggatcaatcgtcattggcgcaggagatttccagttggcaggtactgccctgcaaggtgatgtcctgtctttacttggcacaatcgcagtcgccgttcatatgctgctgggtcaatttttgcgagcgggacttagtgcattttcgtataacttctgggttttcttcgtagctgcttgcacgctggcggtatataatctgatcatgggccatccgttcggaggttacgctgcgtcagagtggggaatcttcctgctgctcgccattgtgccaacgatctttggacattatctcttcaactggctgcttcaatatatgaatgccacaacggtatccatgggcgtacttggggaacccgtattctcttcattactggcctggatgctgctcggcgaatccctcagtgcattacagatgtctgccggggtggtcatcatattcggggtatggatcttcattcgatatggcaaaaccaaacctcaacccattcctgctgatgctcctatcgctggcaaagggcctgttgaacctaccacggtataacgtattcattcgtaaagcatagttataaacgactctaccactctcataaggcggtgtattttgatgaaaaatattgtatccatgcgctggctgctcgccagaatgtatgaaccggatgtagttattgcagattgccgattcttgctcggtcagccggaggctggaagacaagcctatgaagctggacatattccaggagctgtctatctcgatttggaaaaagatctgtcttctcctgtgtctgcgcacggaggacgtcacccgcttcctgatccggctgtgctcgcaagtcgtctctccaaagctggcatcggctccaatagtcgtattgttgcttatgacgatcaaggcgggatgaatgcatctcggctatggtggctgcttcgctatatcggtcatgaacaagtgtatatcatggacgaaggtttctccgcttggaaaaacgccaaattcccagtgactacggatgtgccggttcagatcccgtcttcctttgatgtgaacgtacagccagctatgctggcaagtgcccaggatgttcagcaggcttcggcaagtggcagtgccatgctaattgactcccgtgatgctcgccgctatgcaggtctggaggaaccgattgatgccaaggccggacatattccgggtgcggtgaattatttttggaaagatgtgttggattgggatggacgttggacagatactgcggtgttagaagagcgtttcagtaagctggacaaggatggtgcgattatcgtgtattgcggttctggcgtatcagcttgcccgaacgtgattgcgctggaagaagcaggatatacaaatgtgaagttgtattcagggagctggagcgactggattagctatgaggggaatccggtggctataggcgatgcggaatcgcacaaagacgtatagcagtgtatcgatgttgaatacatcgcccggtggcttatctgccccggcgatgtatttttctatgttcggagtcaacatcaattcaacaacacaacccagtaagtatttaaaagcacacagaagtagacatcaagtggcagctttttttgattcataataacggaaaaaaccgtgatggatatctgtccaccacggttgaataatgaaatctattattgctttttacttaacgatacattagccgttaacgtcttgtcgatcgtcgtccagttgacataagcacctagtatttcattaataacagaaaccggaactacggtttcgccatttaaaagcttaggtacgttactattgaacactagtttatcgttaattgaatacacatctgaaccaatttgcgcgcttatatttttcgcacctaatttgatttgcgttgtacgcgtcttattatcccacactactgtaccgcccaatagctccgaaattgttcgaatcggtacgtagaattcattgttatgaacaaccggtttgattaacgtaccacctacgttcattgcaacgtcaacatgttcaaggaaatcggtttttcgaatgagtccatgaaccccttttgttcggtctacgacctgagatacttcataatccgttgcggccgataggtacgcatatgctacacttctatccatatcaagcttatcggataagaattgaatcgattcacgtactgattctttcatggcttcatccaaatcagggtccagtccaattggaatccaataatcctctgtttcagcaaagggttgcgtaaattctccactgtgtggtagtgatggatcacctttctttaaaaccgttaaacgaactgtcccccttaaggaagcttccaatgcagttaacgctacttccccatctccttgagcaaagtgtggatctccagtatagaatagcccgcctttaacttgaatcggataataaatagttgcaccaacacccaactcattaatatccatattccctcctgtttcaataggtgggatagaacttacaacttcactggtatttggtgcaacccccataacacctagaaacgggttaattgggaaacgtacatttttgccagcttttgttggtaatactccataccaattgccgttgatttcttcaataggcgtaaatatagatacattattatataattccggttttgttgcgctagctccctcttgtgggcctgtattttctggaaattcgttaggaagggcacctttaccatggcggttagaaatgacaccatacggaactcgagtctgcaacgaaagaacttctactttaagaacatctcctggctctgctccctcaaccgctactggcccagtgataatatgaggtccgtcttttacataatcatgcttaatctcagaagccgcaatcaccttcgcatcatccaatactccatcgggtgagataccgaatttgccgaagtactccactggatttctcccttgatcctctatcagtccctcatgcgataccgtatcaaatgttatcgcacttcctgatggtacagtaagaatcggagagctgtctcgattaggcagtgatccccagcgaatgttctcaatcgcagacgttacataataatcaccttctaccttatcaagggttgttggttgcagtggcatactaaagcccactgaaggtagagcaaatgtaaacatacttataatccctactgaaactccaaatttcctaatcgttcggttaataaacattacgctccccctctatactatgtaatattttctaacacaaataaacactaacatataaatacatttacaacaatatttttttgttaacaaacataacattaacgagctacatatcaagaaaaacttataaatataaataatatgtaagtatacttaccatttataagtcatataaaacttaaatacatttagtaaacttaaggatccttcttcagagatttgaacaaatgaaataagttttaggaaaattatgtatgtatttcatgtttctgaacccgccgcaggaatactactgcactccggttcaggcttaatcacctgtccgcacgtgattgcactggaaaaagcgggatactcaaatgtgaagttgtattccggaagctggagttactggattagttatgaggagaatccggtgggaactgtgggagaggtttaagttacgatctatagggaatacaaaagaaccaattgacataaaaaataccgcctgtagtaaattcaggcggtattttgcttcaggatgtctgaatggatgggctgattttctcttcaatattatctattaggtggcagtgattgctcccctagatgatcttctgttaccaagtgtacttcttaaaaaacgtttctaaaatagatatgaacatgtaacgtgaactaaactacataaaaaaaacttcattcctcacgaagaaatggtactataaggaaatagagtacctactaaagtcctaaggagagatattacttggtaaaaaacaattcgttaaagaaacttatagtgatcgtattcactatagcattgctatcattactcctagattctatttcacctagatttgctgaagctaaatgtacatacgtaagtggttatactaagaaaaatggaacgagagtgagtggatactatagaggctgtgggacaacagataataactctagttataaaccttacgtacctacgtacactcaagataataattatttcggcttgtcaaatacagtcaatctgtacaaaggaaataattatgtaggaaatgctgagattgaaaatctcgtatatgtaaacggatattaccgaaaagatggtacctatgttagaccacactacagaacgcatcctaataattatatcaatgacaactttagttatctcgggatttcgtcactagtcccacatacaaagtatccaagtttcatctttaatactaatcaagacatatctctgaaagaaagctacttactatatagtcttgctgaacataatttaaaccagagtcaactcaaaacattaaaaaactacgctgaaaatcttaatgaagtggagttaaacaaagaacttgaacagaaatcaattatcgctggcaagcaattctacacttctctgggttatgatgataccacagcttacaacaagactcgatttgatctctctgggaacctatctattgaggattacctctttaatgtaacttacaactttaatccaagttccaaaggagtatttggtgattttccaatgttagaaacctatgcataccttttaaatgaatctcggactgatttaaatctacttgaagtcactaaaaaatatggtaaaaggttttatacatttgttggtgctgataatttaactatagagaatcaaattgaaatggatttaattcaaccatttgagactaatccatcttcaattcctcttatgcccccaacagaaacgaaaaaacagtcaatcaaatcatatctaatgagtgaaagtacacatcacggcataattttcaactctcaagtatcttttgatataataaattatcaaaactctttagaatccctgtataacggttccagtagtaactttactttttctctctcagaaggtattaaattttatactaagcatggcttaaatgtagaaggtgcacgaaatcaaactataaaggacattaacatcattttggcgagttaagcaactcacaatctaagaatccggtggctaccggggaaaaataaagactaagagcccacgttttgcgtgggcttctttgtgctttcattatatccatacattttaggtgcttacatctccgacttctgtaacgtttagattcagcttatgttttcggcatacttcgtaaaaatcttttgaaacaatgggtttgaagatatttatataatccagcataaaaaattcatgctcgccaattcgctcttcatgaaggcagatttgagatacaactttgacgatcttacgtggaggctgttgtacagatgcagcaatgaccgctttgcgcccatattccgaaagttcataatcaaaaacatccaaacgatcaagctgatgtgcagtccaataggttttttcaaccgcacgaccgtcgtggtaacacaccgttgtcggaataaactgtgtgtttgttttcgtttcctccaacagcgttttaaaacgatctgatacgtgtctcgttcctgtgatcgtctcaaaataatctacgttcaggttgcgcaccgtagacagtaactcaacctctgccattgtcccctctggcaacggattctttatcgccaaataattcatatctaattggggagtgaaggttgttccgccactaataaaccctctacgtgggtattgagattccagaaaataatagttcaaagaatgatgtctccttccgaatgaagtacattttaatcaattatacgggtcaaatagcgataaataaaacaccatgacaagttagattcatcttttgttggtgtacttttttattttttatagactacatagaggcccacatcgaacgatgcggaccttcgttagggttatattgttttaatgaatctagcacacgctatttgctctcattagcacaagtttaaattctaacgaatcccagagacgttatttcgtcagttcggtccatttttaaggtgttgacaccgttttatgacggaatagcgttactgaggtttgttaaaccttgtagtctttcataatccaccatttaagatgtgctagattcgttaacgcatggaacgagggggaatcggaaggagtgaagtccctccttcctttgcatagttatatggcgaatatccattattttaatagatgccttgttccataataaaagatgttcattgaaatgtaagatggcttcccagctccttaaaatcattggtcatatattagtcaatagagagtcaacttgcatgcaaaataggggccggatcacccactaacgtgagtacccgaccccttgctttgatatacatatgaatatacagaccttaatcaacactttaacagatcaaaaagaaacagtctatatttttgggaaaatgttctatatatttaggttgctggccggcaaaatacagttgaaacggagcttaagtcgatgatgtccaacaaccatcttactcgtgaagaattacaggattatgtgcaacatgtatttggtgccagttacctcataacgcagagcgcaagaatacatggaggcgcacaaaaagtcatttacaaaattgactgcacgaatggtttcacttgtatgctgtacgtttgggatatttccagcaactattttcaggaagagatcttgaatgaacccactttccacagttcctatggcagcgaacttttctctttgaatactcgctttctcgctcaacatggaattcgaacaccaatcttgtatgatctaaataacgatagagaccagcgctcttctgattttgctcttgttgagtatgtggatggacagaaagccgaagcatattttcagcataaaaatcacaaagatcgggatgagttgtttcaacggatcagggatatgttgtctaatatgcataacatccaaagaaacgtttatggaaacgccaacgataacaacaaaaaggctgggccttgctaccaagttcagcggttggatgccgaaacagccttatcctatgcatccaaacacatgacagatataaggaataatgacaaaaggttgcttgagaaactttacgaattggaagcagcaattcaacctagagatctctatagtttcattcatggagagttaggtccggatcatatatggatagatcatgctatgcaaccatgccttattgatattgagggcgcaggattcttcgatctcgaacatgagcatagctttctggagtttcgatttggagacttttatcattacttaaaaaataacgatctcgacccggagcggatgacattttatcgattttgccatcatttgtccttgatatcaggaggactgaaactgtttcacagacaattccccgatcagcaattcgctagggggcttgcagagtatcatgccagatgtgcagttcagatgctttcatgaatatggatataagcctggaaggagatttgagcatggagtttattcacaaagatgaaaaacttgcagtgagcgttattcaagccattcacactggagatattccaacgttagagcaactgctggcagagaatccgggattggcaaacataagaatattggaaagaaagcctgacaacgtagatgcagactccagtatctctcgaacgctgctacacgtggtgacggattggccggggcactttcctaatggagcggataccgtgcaagtattgaccaagtttggtgcggaagtgaacgctccttttgtcggtccaaatattgaaacacctttgcattgggctgcaagctccaatgacgttcaagtgctcgatgcccttcttgatgctggcgcagacattgaaacgcctggcgcggtgatcgccggtggcacgccgctggacgatgctattgcttttgcacaatggaatgcagcatggcgcttggttgagcgcggtgcgatctttgccctttggcatgccgccgcccttggagatattcacgccatacaagaacattttaaaggagcccaactcccggaacgttatccttggggaacaagcacctccccttctcctcccgatgcagtaaccgttgccttctggtgtgcttgccatggaggtcaaagagaaacagccgaatacctgcttgaccaaggcgccgaactgaactggatagccacctgggatggaatgactccactggacacagcaagacgtaatttttcagctgaactgatcccgtggcttgaaagtcaaggtgccaaatccgctaacgagattcacacaggtagatgaaaagctagcatggaattgccattcgccagtggctgcgaatacagttatgaggagaatccggtggccactggggaagtatagaagactccaacaaatatacacaacgaaaatacatcgccacttgagcgatgtccttttcgttgtggagtgaccctagaaccgtgagaggcgacaagggtctaattcatttcttgatttgccatcaataatttcacttgcagccagattcgcaatcagcggcgccagcgtaattgcagaatgcattagcgtcagataaagtccattcatgtgatcatggaagcccacaatcggataaccgtcttcaggcatgggtctccatccaacctttatgctctccagttccaattgattaccgtgcttgagactgcgacgcaatgtatcgtaagctcgcttaccgaccgcctgtggtccgttttcctccgactcgtcgatataatcttccgcagccagcagcgtataatctgtcagttgacgcgcttcaaattgcgcattggagattaatgtgtgtatccgtttattagcagttttcatccgaatcagaatcgaaggtgacgaagttattggcacgtgacaacctaacgggttacaaagttcgggtgtacctgttcctgcggccaataccacaacatccgactccacaaaacccttggatgtatgaacaccaaccagacgggaaccctcttgcttcagctgtgtaacgttggtgtcgaactgaatctttgctccgtactcttgcgctttgctcaacaacagctccgttaccgcaatagggtccaccgcaccttcttcgctgacaaacatggcttcatccggatattccttcagattgggctccaatgcctcaagctgctcccggtttaatttttgaaagtgttgctcccttagaggcggagtgtcccaagttagcgcaccatgccaatgaattttcagttcggacaactcttgctgaagtgtgtgatattcttccacagctgcatcgtacaaatgccagtattcaggagccactctatgcgtcgtatgtatccaggcaaatgatttttctgtgacttcacgcgccgcggctgagtgccgctcaataacagttacatcttgatttcgtttggctagatgataggccatacacgccccaacaatccctgcaccaataatcacaattttttgtttattcaaaactaactctcccttgtcaccctatcaccccaaggaatcgattttccgaggttcggatgggtgtgctcctttttcgtcttcttcgctgtacagcttctccatatgctgcatatggccggctccccagtcgctcattgtctggagcacaggtttcatgagctgtccgtactccgtaatcgagtattcgaccttagggggaatttgagcatatacttcgcgatgcacaatatcgtgatactccagttcttttaactgctgggtcagcatttttttcgaaatatctggaatggctttttgtaattcgctgaaccgcattgtaccgttgctcagcagtcgtagaagaatcaaagatttccatttacccgtaagaatatccaaggccgttccgaatttgcaatataccgtcattcttattcctcactttctgaccatcccagggtatacttttagttacctggttaggtttaagtgcctacttccagattgggccttctcactttagtatagaggcagatattaaaatcgagcaagtgagaggataagaaaagatgaatgtaacgttatggatcgtacaaatcatattggcgctaggtttcatatattcaggatggatgaaaaccattcgtatcgagtcgtcaaaaaagacctgggcctgggtcaatgatgtgccaaaaagtctagttattttgatcggtatcgcagagctactcggagcgctgggccttgttttgccttgggcactgaacatcactccggtgcttacgccgatcgccgcaatcgctttggctgttgtcacactgcttggaatgctgtttcatattcggcgtaaagagtaccgggagctcggcgtaaatatcttctttatagttctggcattgatcatagcctttggaagactataaaggaaacggggaacgttctggaaagtgacaaaaagccactaatattattatataataacctcaccacataaaaggctggcttcaacagctcatggaaggaagacaactctctattgaaagcaaccttgaatgtacaagaacacatactcatctggaattgtgcatcgctcaaaatcatggatgtacgacatattgtcatacaggccgacgagtgcgtacgtccttacctgttccctgccagcgcctttttgtacgtaacgaatggcaatgcaaccgtgatcttagacggaaatgagcatgctaccaaaccattttatatgctccatgggggcaaaaacacccgtctggacatcatcccaacggacgaatcctttcattattacctaattttctacaaagcctccttaccgctatctggcaagcagcatacacttcaacaaccggatcaaccattgccatttcacctccagtacggttttatcccataccatcctgccatcctctacgaaatcactgagcgaatgctgggcgagtggaataaaccgggacgcttggagcgactccataccaaaacactattctatcaatttgtatatgaattgctcagacaaatggatcaacagcaggtaagcattgttaggcctaaccttgcttctcagcttattcgctatatgcaggagcactacgccaagccgctgacgcgggaaaccctcgctcatacattccattacagcgtcccttatctgtccaagtacttccgacgtgaaactggcgcaagtctaatcgattacttaatcagtattaggatgaacaaagcagtaacgctgttgcaaaagaccgagttatctctgcaagaagtcgctgcaagcgtcggatatgctgatgtatcctattttataagaatgttcaaaaaacatacgggagtcacaccaaagcaattcaaggatgagtccggacaagtgacaaaaggttcttatcgtcctatccttaggcttcgatcatccattgctccgcgtaaactccgtcgttatattgatatcagagatgataatcattatcaacatagcgaaaaaggagatttacggatgtatagaagcaaactacctgtaggaattaccctactgttgtgcctaactctattggttagcgcatgttccaggccagcaaacacgaatggaagcactggcagtacgcaaagtccaactgtaggtgcagagagtaatatcagtaacaccacaaacggaagctcggagatggtaacctattctgcggttaacggtgaagtacaaatccccaaaaaacctcaaagggtcgtaatggttgcaggagcctttaccggtcatttgctagctcttggccttaagcctgttggaactggtgatgagtcctttaacagttatacagaaggaaagctcgatgacgttgtcaacatcggtaacgatttaccctacgagaaaatcatggagttgcagccggatttaattgtcgtttggaatgaccctgaaacgatcgaaaagctgtccaaaattgcgccgaccgtcgctgttgaatatggaatacctctacgggagcaattgatggattttggcaagatgactggtagagaagagcaagcgaaggcctggatcgcagagtgggatgctaagatcgctgaatataaaccactcgtggagcaagcggtaggtgatcgcacggtttcgatttttgatacgggaagtgccaaagaattttatgcctacgggagctttggtagaggtggagatattatttatggagagtttggcctgaaggcaccgccgatcattcagaaggaagccatcgatagcggcaaaggttgggccaagttatcacttgaattgttaccacaatatgcaggagattatatctttgtaagtggatggacaggtgatgagagtggagattccgtttttgaaggtcctatctgggataacctccctgctgtccagaataatcacgtttatcgcgaggaaagccgtggcttcgtatttagtgacccaatttcgttggaatcccaacttaaatttgtcgtagacagcctaaccaaaacagagtgaaattgagtaggccacggtatgtacgaggcgaggagcaatcctcgtctttttatgtttttgtatagtccttatctttcatttgaagagagtttgaaaacaaaagcacacacataaacagggacctctcaccatgttggcaagagtccctgtctttaaacttgttatatagcccattttccgttaagtgatggtaaggccgccacttgcatatcccgctaccgttgtagccacatcaattccggctgttactgatgctgagaataccataagcaggcggtcaccggcagataccggaatactcagccctgtagtcaccccgctggatattgtgcccagtgccaaaatgccggtcagtggaggagctaaggttaccaatgcacccggtacagctgtaaaggagttattaggtgtagtggatcggaataattgtgcagttaaggttactgtagatccaaccaaactaagtccggctgttgtgctgaaataagcggccagtgaagtaatcgttcctgcacgcgatgctgagaaagcaaagttaagcaatgtgcctgcagcgcctgtgagatcaataattcctccgttaacacttactccggtagaactgttaccaaaaccaactaaactggaagtattcaaaagtccacccaaaactgtagtcaacacaacgggaagtcctgatgcataaggaataattgttccagaaccactcgcacccgtagccccggttgtacctgttgctccggttacacctgttgtacctgttgctccggttactcccgttgtacctgctgtgcctgttgctcccgttgtacctgctgtgcctgtcgctccggttacacccgttgtacctgctgtgcctgtcgctccggttactccggttgtacctgctgtgcctgtcgctcccgttgctcctgttgtacctgctgtgcctgtcgctccggttacacccgttgtacctgctgtgcctgtcgctccggttactcccgttgtacctgctgtgcctgtcgctcccgttactccagttgtccccgctgtgcctgttgctccggttgtacctgttgctcctgttgtacctgttgctcctgttgtgcctgttgccccggttactcccgttgtacctggtgcgcctgtcgcacctgttacacccgttgtacctggtgcgcctgtcgcacctgttacacccgttgtacctgctgtgcctgtcgctccggttactcccgttgtacctgctgtgcctgatgctccggttactcccgttgtacctgctgtgcctgttgctccggttactcccgttgtacctgctgtgccttgtgctcctgttgcacctgtcactccagctgtccctggtgtgcctgtcgcccccgtagccccagttgcgcctgtagctccgttgatgcttggggtttcgcccagcaattcggaagaaaccaaacgatgggctgttaccaaagcgcctgtgctgctcttaccccatacggatacttgaacaggatcattaatcgtcgctgttgttgtaaaagtaaactcgaaggcatctaaattggcaaaatagttgttggttactatttgattaggtgcgatgtcaaaagactcactgacatacagaactctcattccaccactcatgtaatacccttgtatttgtatggttgaggtagtcacatcactgcgattatcaattttgactgtaactgtctgagtcggccttacaccgctaacagcattattttctattggccctgttgataaaaagctcatcgctacatctcctcttttggggatttctgatctcctagatgtcattaactgttttttcgtgctccaccacccggtgtgcatctaccaattgcccagaggcttgtttgccccacactgaaatccctacttcctccacaccttccacgtctgttccaaaaacaaactcaaaagcagctaaatctgcaaaataagttctggtcactgcttcattaggagcaatactgattacttcactcacatacagcgttcttgttgtgcttagcacatacccctgaatggatactgttacagaatccacctcagcccgacttaccaatctaatcgttacctgttgtgtcggtctaaccccggaaaccggattgttttcaatcggcccagttgacaaaatagccatttttcccatcccacctttatgaacctctgactctagcagtatttggcataagctcactcgatagtaatattcaaacactcaatcaacggtgtggacaaaacacagggggcaacccaccattatcacttaacaaccttttacgcacagggctttggctatacaaaaactgggatatgtacaacaaagagaagaaattatgcaatgtcaaagttggtcagcaagtaagagtagattttgttatataaccaggatcgattccagaaaaaaacgaaaataaccgttcctctggtagattccagggaaacagtcacagcttaagacgtctttttctcgtatcttattgttggccgggtaaagctatgcttgaaagtgtagttttatagaatacgagatagtattttaccatcaaacccaatgttaaacacatagaataatgatcttcttcatcctctactaaaaaatagaaaaagattgtattatcttaaaattgtgatatgatatcgtcaagttaataaacatttaaaagaaaatatgaaaaataattacatttaaatgcggccaaatctctttcttctccaaatttcagtgttctaacccattttattgaaagcgattacaaaaagaaacctgacagattatagcttttctaatcgcacccacagatgcaggcttacttcgggttatagccactccccttgctgccgtgaccacgtacccggtgcacaggttgtctggcttaaaccatatatgacaacatgaagacttatcctaacagccaacctaaccattatttcaagaagggggtgacatgaggaaaatcttttcgttttttcggcatttcatcatctcagctatcctgaattttagctcaccaactaatccaatctcatggaggcgaaacgtatgattcgtaaaccgctagttttgttgttgtcgtgtctgttaatctttgtcaccctgcccatggaatcaagccatgcagccaatgcagccgttgccaaacttcctggaaactctaatcccctcatcgatcataaactgggagccgatccttatgtgctcgtccataacaatcgggtctatgtctacatgacaggtgatgcatatctgtacaacagtgacggctctgtccgagagaaccagtacagcacgatcgggaaaattaacgtcatctcctcagctgacatggtgaactggacagaccatggttccatcccggtagcgggtgcgaataatgccaataatggacaaggaattgccaaatgggctactcagtcctgggctcctgccatggcgaagaaaaccattgctggcaaagaaaagtttttcctgtactttgccaactcgggtggaggtattggcgtactcacggctgattcccccattggaccgtggtccgatccaattggtcgtgccctcctgactcacggtacaccgggtatgtccggcgtaacatggctctttgatccggctgtacttgtcgatgatgatggctctgcttacttgtatgctggaggcggcatcccgaacgataccaatgctgcttccattgccaatcccaaaacagctcgggtcattcgtctcggtgccgacatgaccagtgtggtgggcagtgctgtgactattgattctccttatatgttcgaagattctggcatccacaagtataacggcaaatattattactcctactgcatcaacttcgcgggaacacatcccactgcatatccgaaaggtgagatcggatacatggtcagcgacagtccgatggggcctttcacgtataaaggacactttctgaaaaatcctggcacgttcttcggtgtaggcggcaataaccaccatgccgtgttccaattcaacaacgaatggtatgtggcgtaccatgcgcaaacggtaagcaaggcattcctcggtgatggtaaagggtaccgttccacacatatcaacaaactgacacataatgcggatggaacaatccaggaagttcaggggaatatgacaggtgtacctcagaccactaacctcaacccgtatgtccgggtggaagccgaaaccattggctggcaagcaggaattaacactgaaccgagtcaagcgagcggtggacctgtagccaatcagaatgtcactaatattcataacggggattggatcgcggttggcaatgttgattttggctcagctggagcctccaagttcaaggccaatgtcgcttctaccggaaatggcaacatcgaggttcgactggacagtccgacaggcccactagttggaacacttaacgtaagttcaactggcggttcgcaaacttggcgcgagatggagaccaatgttaccaatgctacaggggtacatcgtttatatctggtgtttacaggctcgggcaatggaaatctgttcaaactggactactggcagttcacatccggttcgggcggtaacccaaatcctaatccaaatcccaatccaaacgttacccgttacgaagccgagaatatgacgcttggcggccaatacgctggtgtgatcagttccccttttaatggagtcgctctttacgggaacaatgattatgcagcatacaatcaatattttgcattcccaacccatcaattctctgtccgcggcgcttccaacaataatagtacagcccgtgttgatctggtcatcgggggtgtaaccgccggttctttctacttcacgggaacggagccgaccgttcaaaccctcaccggcatcactcacggtacaggcaatcaggaaatcaagttggtcgtaacaacggataatggcacttgggatgcttacattgattatctggagtactcgctttaattcataggacatgatcaattgggaggatagaatatgtggaaaaaaatcagtactcttctactcgctcttcctttgcttataacatcattccctttgacaagtccggcagcttcagccgcaacgttcagcaatccggttatttacgcggatgttcctgacagtgacgtcattcgggtgggcaatgcattttatatgacaagcacaacgatgcatatgaatccgggagtcccggtcatgaaatcttatgatctggtcaactggagcatcgtaaactatgtatacgatacgcttggaaacggggatatacagaatctgaacaatggacaaaacgagtatgggcgtggttcctgggcgagcagcttgcggtacaacaacggtatatattatgtggcctttggctcgctttccacgggcaagacgtatatttaccaaaccagcaatattgaaacagggccatggacaccttacacattgaacagttattaccatgacccctcccttttgtttgatgggaatcgaacctttcttgttcatggcagtgataacatcagtatcgttgagctgacacctgatgccaaagccgttaaatccggcgggctcaatcaggtcctgattccaaacgcaagcagtgttgccggctccaacatgattgtaaaggcagaaggagcacacattcagaagatcaatggtatgtactatgtattcctgattgcctggccttcgggtgatggtcgcattcagcttgcctatcgtgcaaacacattgacaggtccatacacaggtaaagttgtactcagagactcgggaatcgcccaaggaggcatcgtggataccgcatccggcgcttggtacggcttgctgtttcgtgatagcggagccattgggcgcatcccctatcttgttccagtgacgtggtcggataactggcctgtgtttggggtgaacggcaaggttccccttaacatgaatatgcccgttgaaggtcagcctactgccaaaatctacgggtccgatgagttcaacgcaaccacatcaggcacaccctcagtaacgcaactgttagtgaacggcggctttgaggaaagtagcattcagccctggaccagcaacaatacggcgaacatcaccgtaacaaatgccgaagtgttcagcggtacaaaaagcttgcttgtcagcggcagacagcagacagcaggcggagccaaacagatggttacaggcaagctggtacctggaggaacatactctttttcggcaaagatcaaatacactactggtcctgcaaccaaaacgttcaatcttagcatccagaacggtgcaagttacaccggaattaccattatgggcagtgcgacgttaactcgcggacagtggggtaccattcaaggtacgtataccgttccgtcaaatgcagacctgtcccaaagctttatttttgtggaaacaccgtataactcgaatccggacccgaccaatgatttgatggcgttttatgtagatgacgtctccctgacgagcaattcatcttccggtacatccagtctcgctactttctggcagtggaatcataaccctgatgctgccaactggtccctgctccagcggcccggtttcatgcggttaaccgcaggcaaaatcagcaagaacctgttagaagcccgcaacacgctgacacaacgaacctttggtccaaaaagcacaggaatgaccgctttggatacagccggcatgaaggatggtgattatgctggactcgctgcttttcaggccaaatatggttttgtcggcgtaaaaatgacgggcagcaccaaatccatcgttatggctaatgccagttccggcaccatgactgaagtagcaactgtgccattaaaccagaacagaatctatctacgcgtcatctgtgattttacgaaccaaaccgacaaagcctactttgcttatagcctgaatggtagcaactggacaaccattggcaacacacttcaaatgtcttacaccctgccacactttatgggatatcggtttgcactattcaattatgcaacgaagtctaccggaggatatgcagatttcgattatttccgcgtagaataaatgtagttttattcggttattaatgtttcgtttattgatcaggacctggacttcaccatgtgtgagccaggtccttttcagtacatttcttatgaagagtttcagcttttaacttttaaaaatcccggaacaagtgttaattcaacaatagcgcgagctggagcgggacggccttgtcaccagacatgtctaccaacagatgcctcccaaagtagaatatggacttacagaatatggcgttaccgccaacaccatcgtggatgtcatgtgtgcttgggggagggacaatattgctctcaggcaacaacggggcgaagatatcgtattgttggagaacaacgattccgaatcttgatttcacagttgcacattccccatacattatgtaggacatatgtctctttttccacgaaaacgattaaaaaacctttatattccagacaaaatgatcgatatacaaaatggggcacctgaatatcccgtgttgagcattggattcacatctcacaaaagcaacacgggaaacaaaatgatacatacggtagcgagtaagagaataagagaagctctgtctggtgagatggcaagggctaacaaaggagtagtcatatgaaggtacgaacgagtcaaagaggaaaaacacacaacatctacatgaacttgctgttatctgttctgttgttgattagcagcatcccgctgtggccggtctcaaaagtgaacgccgcagatgaggaacatcatctgttatccctgaaccggcctgtgtacagttcgtcatctctgggcggcaatacggcagatcttgtggttgacggcaacaaaaacagccgctgggaaagcatatggcagaaagatccgcagtggatctatgttgacttaggcacggtggcctccatctcgggcatctccatccagtgggaaaatgcgtatgcttccgcctttaatctggaagtatccaacgacgaggtcaactggcagtctgtttactcgacaacgaaggggcaaggcggcctgacagaaattgaggtcacagcggaggcacgatatgtgcgcttgttcagtcatcaaagagcacagccagcctatggcgtctctgtatacgaattcaatgtatatgggacgggcggagcaaatccacctcccaaaccattagcaatgaaccttgcactaggacaaccggttacagcgtcttcggaagaaattgatgagcccagccgttcagccgaggataaagccaaaatggaaaaagggaattacgaagcacggaatgtaacggatggccgtccggatacacgctggtcttccatctacaaggatcaggaatggattgttgtagaccttggactaatccgggagatcgggaacgtatccctacaatgggaaaacgcttttggacgtgcatacgatattcaagtatcaaatgatgcagaccagtggactacattataccgggaactgcacagcgacggtggacgggatgagattccggtatacgccgaagcacggtatgtgaaattagccggacttggcagaggaacaaccaacggatactccctgtacgcattcgacgtctacgagtatatcgaaggcgatgccaaacctgtgcatacaattccgaatatccctgaaccgtcctcggtaaaggtgggttccgggagttacgctgtaaatgacatcaccatgctgcagccgaaaaacccgaaaaatcgcacggctgacatcacagcgcccctcccttccaatgactggtggcagtctattcttgtatccgatctgggggatggcaacagtttggtcacactcccgcttaaaagcagatataccaaacaaggacttcaacttctgaatcccggagctggttacgtttcggctgatggcggttctatggacgctgacggtgaaccggatctgatcatgagcaccagcaatatgaacccggctgaggtaaataccaaggtgacgggatatggggattattccgcaacgatcatcatgagcgatgatgacacagccaaaatgaataccacgtttgtgaaaggttcccctttcctgtacaacaccttcgataacccggataccattattgttcgttctcccaacatcacacgtctcttcgatgatcagaaccgtgaaattgttctgaatgatggagaatcgctgacggccgatcatatcggtgttgaagtaaccaatcaggacagagcgcccacgcctcagacctttacaagaaactacgggatctttgcacctgaaggaaccgtatttatgaaacttggcaatacgctcaaaatcaagctgggccagagcgaagactatctgtcactcgctaccctgccgtccgcggcagaactgtcttattattaccggcatgcctacgcctttgtaaccgatacaacagtggactacaattataatgagagcacttcactggtaacgactaccttcaactcggtaacccggacgaagcgggcaggcttttcatccgagacagtgatggccttgttgccgcaccaatggaaactagcgactactccggtaacggagcttgcttacccttccattcgcggcatgatgaaagtaagtgaaggcaatacgtttacgacacaggatcgattctatggcattattccgcaatttgtggagccagatgatccaacctactcgcgtgcacaattaatcagctatctggatcagcttgacgcggatacggcaggcaatctgatgagcgaggatccttactggcaagggaaaaagcttcatccgcttgcgctgggtgtgctcatcagcgaccagataggagatacggtacgacgagacaactatctgtccctgcttagaaccattttgacagattggtatacctattcgccggacgaacctttgcactcgtattatttttattattcggatgaatggggaaccatcttcccttacggtagcggattcggtgttaataccggattgacagatcatcatttcacctacggttattacgtttttgcatcggctgtactggccacatatgacaaaacattcttgcaagattacggcgacatggttgagcttctgattcgggactatgccaatccttcacggacagatgatcagtttccatggcttcgcaattttgatccgtacgcaggtcactcctgggcaggtggttacgccgataatcgcagcgggaataatcaggaggccgcaggagaagcgctctttagttgggtcggccaatatatgtggggtgaggtgacaggcaacaaagcctatcgcgacaccgggatctggggcttcatgaccgaagagaaagctgccgagcaatactggtttaactatgacggggataactggctggaggattaccaacacgctacggtaggtcatgtgtacggcagcgcctacctgtatggaacgtacttctctaatgaggcggagcatatttacggtattcactggctgccgccagcggaatggatgacctattatggacgtgatccgcagaatactaaggctctctacaatggtctcattaaggacctgggtggtcagcaggagcgcacatggcagcatattatctggccattccagtccattggagacccgcaaggtgctctagccaaatggaatacgagcgagatgcagcaaaatgaagtctttaacgcgtactggttcatgcacagcatggcttctacgggaacacgcacgatagatatatgggcagatgatccggcagcaaccgtgtatgaaaaagacggcgtctatacagcgcaaatctggaatccgtccgacactgtcaaaacagttcatttctacaatgcccatggcgctttgggttcggctaccgtgtatgccaaagcgcaagtaaaggttaacccgctggaacattccgtcgttaaacagccggatgcctctcagggtgtagtctatctcgatcggagccaatggaccattacggcatcctccagttcggagccggtagagcacatggtggatggtgatctgactacacgctggtcatccggacagattcagaagcccggcgattggctgcatatcgatctgggtggcgaacagtttatggatacggtattcatgaactccggcaacaacggcggtgattatgctcacgggtacgaaatctacgtatccaaagataacgagaactggagcgagcctatcgcagagggagcaggaacatctccaagtctgtccgttgatttgggcatgcaaaccgcccgttatgtcaaaattgtattgacttcctctgcagacagctggtggtcgatctctgaactcaagcttgcccgatttggcaagcttgaagcaacaccagagctcccacagcccgtaccgcctccagatcgctcttcatggatcgtaaccgcctcctctactcaaggagcagatgttacagccaacatgctggacggaagttcagatacactatggacaaacggtaggaagcaaaccaaaggacaatggattaccattgacctcggccagaagagttttttcgatgccatagaattggacccgggccatgcgaaagaagactatccgagacagtatcggatttatgtctcggatgacggtgaacactggggcacatccattgcgggcggcgaaggcacgcctggacgcatgtccatcactttccctgaacagcaagcacgttatgtgaaaatggtgcagatcggggattccgatcaatggtggacgatctccgagttgtttgttcatcataatggaacgggcaaacaaaagaggctgctgccagatggctggtccgtgacagcttccttcggagacgatgcagtggctatactcgacggctcggaccaaacacgctggacctccggtcagactcaaacaggcggcgaatggattcagcttgatctgggagcctcgcagccagtgaatcggattgtgctggacagcgcgcacagccgggaagactttgctcgcggttatgaaatatatacttctctggatggagagcattggggaaaagccttggcttcgggtgaaggatcagatgcgctactttctatcgcttttacaccgcatgaggcacgttatattaaggtcgtacagacaggtaccgattctcattggtggtccgtggctgaattagaggtctataccgctgatcagacaccttggatatccggggaacaggatcatctgttacctgttgaactggatcgaacatcatggacagcgactgcctccacctctgaagatgttgcggcgatgctcgatgacgatctgaattcacgctggacctcttcatctggtcaacatgccaatcaatgggcccagattgatctgggaagcaagcagagcttcagccgcttgacaatggactcaggcagcagcagcaacgattatgctcgcagcttccagttcttcacttctgatgatggcgaacgttgggaaggggttacggaagcactgggaacaggacctgtcatctcacatacgttctccagacaaacggcgcgatacatcaaaattgccttgaccgcggacactcccgagtggtggtggtccatcgccgagttaaaactttaccattaatgttatcatgatctctccaaccatctctctcccgtccttgcggggcagaggtggtttttcttgataaggatgaagcatacctcatgtaaacttcatgttccatatatcacctttatagtaagatatagattaatgtaaatattattaatttctaatcgataaggagggctttatttgaaaaatataattgtctttggtgcaagcaagggattgggcgatgcatttgtcagaggtgtgccacaatccggtgataaggtctgggtggtctcccgcagcaagccggaaagtctgtccgtggaggatggcgtcgagcgaatatggattcaggctgatctttccgagcttcaggccgcagagcaagttgccagccagcttcaaggcgagacgttggatgtgcttatttataacgtggggatctgggaaaaggaaggatttgaagagcactacacgtttgataaggatgaacccgcagatatcagtcagctgatccatgtgaatgtgacttctacaattgtatgtatacaggctttactgcctcagctccgccagtctgaagcaggcaagatcatcctgattggttcaacagccggtttgagcaatgcaggcagcagccaggtttcttttgtcgcctccaaatttgccatacgaggtattacggaagctctaagagaacatacgaggaatgaccgcatcgcggtgacatgcatcaacccgggagaactggcggcagaaattccatatgaagacgggatggaacgtgcactggccgagtatgatgggactcgcattcccctgcaggatatggtcgccatcgttcgatgtatcatcagcttgtccaaagcggcctgcgtaaaagagatcaacatgcccgccttaacggatacgaacacctagatagcaatgacatctacacgcctcaatcggtccgttcaccggagtgcgctctgtatacacacgctggacagaagcccgtttacattaatacatgcgacaagtgcgcaatacctgcggaattcaggcgttcatgctcagggatattttcatataacaaatgggattttccggccttgtccaggtgatcacgaatagctgcaattcgtcctttgttaacatcaataaaacgaaaatcgatttggcgtaaatgctccaacccggttagtccagcaaaagaatccgccttgagcgccgtattcatctctttcagttcaatagactccaaagcaccggctgtccatagatgtttggtatcccgcaacgatttcatatagtccagttcgagctgtctgagagaggtcatatgggaaaagtcgcataactgctccagcttgggcaaggacagatgcagatattccagcccgcgcatctgttcgagtccctgaatactcgtcagtttgcgaacagagctgagcttcaacatcgagatggtcgactgtgtcaatacatctagtcccccttttaactcacagtgatccagggacagatactgaagcatgggcaattccgctaacacatcaacactttcgaccgtgcagttcagaatgagcgtatgcagttggaggcatgccgcaatggaagcaaatccgttgaatttgccacgcagttcaagaaaggtcaatcgtttgtagtgtttaataaaatcgagcacggttgcctttgcaggtgaattcaatcttagaaactgcagttgctccatcgcacccagaatcgtcaaatcctgagcctgcgaaagatcaagctgcaaggcagacacatgtttcaactgtgccagtcgccccaaaaatccggatgaatacacccctttagggtccatatgtgatatgtgcagaatcagatccggccgggcaaagaatactttggcatcgagctcggcaaggtcctcgtatgtatccgcgtcaacgcgaaaatgaaccgttgctctgcgacgcaacagatgcaccgcctggtgcatcttttcggcattccatggaaccccctgtattgaagcatgccataactcactcacagataatcccccttttccatccatagttccaattcattccattataaacaagatcgcctgaatgaaccactaccgatcccgttttttcattcctttcctcttttttcatacctcccctttcatccttctcatactcatacctttcctttccgttgctttcaggattattcgacagaaatctacataaaactatagattaagccgacatataacttaggcgttttgagctttttattaatcatctggggagatggaatatgtcgaacatgttgaacaagtgggggaaaacgggagcacggacatccagtatggcaaatacgttgtccattgtgctgctgatcattatcgtagttgtctttgccgtgctgggaacatttatgtttgcaagcacacgaaacattctggtgaaacagcaggaatccatgctccagaccaagacacaagccattgttagtgaatttgatgcactattcaaggaaaagggcgcactggtcaagcaaatgtccaccaacacattatttcagcaatacatagaaacaacagcatctgctgcggatgcgaaaagttcaacctacgctgcggaaacacaggcgacactcgccgctatcgttaaggcagagccttcgtttgccgatgcctgggtcgcgggtctggatggaaaaggcttttggattcaaaatgatggtgtcgtatctgcgccggactttgatatccaatcacgtccatactacaagccggttaccgacgcagacggactttatttctccgatccgtacattgatattgcagcaggcgatgtactcatgggtatcttctatccgatcaaagacgacaacaacaacacgatcggctttgccgcagcggatattgcattcaaggatatcccggcgattatggagagttattcccttggaagcacaggttattccatgttgctatccaagagcggggaaattctgtaccatccagatcaagagaaggtattgaaggagaacatcctgaacagtacgggggacatgggagacatcggcaagaaaatgcttgccggtgaaaacggcgtacaacttatgaacgacaatggggaacgtcgatatatcggctacgctaccagcaaagatacgggatggtccgttggtctgaccatatccgaagaagaagttcttgcggaattaaaaacattcacgtggattacgcttggcggttttgctgcagccacccttctgcttgtgattatctgttatattacccttcgccgtctgttacgctccataccacagctgctggccaagattaaacagattgaacaaggtgacctgactgtccaactggatatcaaatctaataatgaaattggacagatcgccacaggcttgaattccatggtgcagaaaattcagggcatgctgcaaatggtcggcagctcggcgcaaatcctgaaccagtcgtcgaatgatctgcaggccatctcctcacgaacggctgtgaccatgaatgacacatcaacagccatcaacgagattgccaatgcaacgaattatcagtccatcgaaacggaaaatatcttacgcaaaacaggctcattatccagccaaattgatgaaattgctaccgatgcgcaggctatgggaacggtcgtgcagacatctgctgatcaaagcagccaaggacttgcggtcgtggaacaattatcgaaatggtccgaggaaaaccaccagtccacccaagcaatgtcctctattatccaggagattgacctgagtcggaatgaaatatccagttttgtggatacagtcaaacagattgcctctcaaacgaacctactcgccctgaatgcctctattgaggctgcacgtgctggcgaacatggaagaggatttgccgtcgttgccgaagaggtccgcaaacttgcagaacagacggctcaggcaacagaggaaatcaacaaaaaggtgaatgttattgaagagaaaacaaccctgtcggttgaacataccatgcgcggtatgaagattgcggaggagaatgccaaatccgtagaagataccaaacatgttttcttcagtattaacaaagacttgaaagatctgcagcaacgtatgatgcagattaccactaataccgccaatgtacacaaacacaaagatgagatattccaggcactggagattatctcatccaccacagaggagaactcggcatcgacggaagaagtaagcgccagcacgcaggatcagctggatagtatcgaacaggtagcggatctgtcgaaacagttgaaccagctatctggcaaactgcaagacgaactaagtcagtttaaagtaaagtcatgatccgcaagctttcccctgctcttctcttttagtcgctgtccatttattattaatgaatatgcgtacgaagaggattggaggctgaatcatcatcatgaactttgccaaacgaatggatcatttcaacgaaggaattttcaccaggttgctggagatcaaacgccgcagactggagaacggtcagcccgttattgatctcagtgtgggtacgccgaatatcccacctgcgcagcatattataactgcactatgcgaggccgcagctgatccggctaattatatatatgctgtgaatgatcagagtgaattgctgcaagctacaagcgattggtacaagcagcgctatcaggtcgagttagacccggcaacacagatctgttccttgctcggttcacaggaagggctggcacatatatccctctccattgtcgatgaaggtgatctggtgttagtccctgacccctgctatccagtctttgcggatggaccgttactggcaggtgcagaactgtattatatgtcgcaaaaagaagaaaacgggtatgttattcagcttcaggatataccggaagatatcgctcatcgagcaaaattcatgctggtctcctatcctaacaatccgacaactgcgatggcaccggatcagttctatcttgacctgattgcctttgccaagaagtatgatattatcgtgcttcacgataatgcgtacagcgagctcgtgtttgacggaaagtcatgtggaagcttcctcgcattccctggcgccatggacgtcggtgtggaattcaattccctatcaaaaacgtacggactggccggagcgcgaatcggcttctgtgtgggcaatgcaaccatggtctccatgctgaaaaagctaaaatccaatatggattacgggatgttccttccgatccaaaaagcagcaattgccgccattactggtgatcaatccgaggttgaacgggtcagagcaatctatgaacagcgcagagacatcctctgtgagggcttcagcagtctgggttggccgattgccaaacctgaagcaacaatgttcgtctggagccggattccggcgcactacgacagctcggagcaatttgccatggatctggttacacatgcaggagtcatcgcaacgccaggcagtgcctttggtccttcaggtgaagggtatgtgcgcttcgccctcgttcaggataatgaaatattgcaacaggcggtacaatcagttgatgacagcgggattctgaaatccagctaacgggagcacaattcgaatgtgctcaagccaaaatcccctcaagatccacagggagtaagagtttcacgtttgataacgtggactctacttcttgtagacgtgaggggattttgtcatttggtgcgggagtggacatgacagcaaaaagcctgctcggggagcaggcttcaggtttgaactattttacacagacttgcgccagttggaacgatacatcagatacaggaagtacggtgttccaataatcgcaatgagtatacctgatggaatctctgtcggtgccatgacggttctgccgattgtatcggcgagcaccagcatgactgcacccgctaatgcggataggaacatcgaacgtcttaacttattccccgtcagtaaccgaaccatatgtggtgcaatcaggccgataaaaccaacggttcctacacaagcaaccgcacctgctgcaagtaatacacccactgtcatggccagtaatcgtgtacgacgtactcctagaccaagcccggatgcactgttgtcgtcaaataccagcagttcgaatctgcgtgccagccaccaagccaccggtaccaaaataactaaaaataatccgataaccctcacctgttcccaggtacgagcataggtgcttcctgtcagccagatatatccgctgctaccgtataccgcaccacggacaatcagaatctgaatacctgctccagcaatggcagacatcgcgatccccagcaacacaaccgccgaagggttcagtcctttcttccaggcgagggagaacaccaccactgcagcaatggctgcaccgatgattgccgcaattggcagcaagtatatcggaagacccggccataagatgatgaccatcatcgctccaagccctgcacctgaggacacaccaacaattgaagcatctgccagcgggttacgtaccgccatctgaatgagcacaccactgattgccagtgcagctcctgcacctgcggcaacaagtgtacgcggaatccggagctgaatcagcgcggagaacagtccatcggattggaacagacttggtaaccaatcggccagcggaattcgcataccgccaaacatcgtactgagcaagataagcaccaccgttatgactgagaataatacagccatcgggccaaatgcaaagcgacgcgcagctcctcctgtgctcattgaagtagacatgcctgatccgttcgcagccttcatgcgtgtaagaacaagccagatgagccacggcgcaccaatgatcgccataacagcacccgttggcagttccatgctggagttatgcaccatcttggcgaggacatctgctccaaccaggagcgctgcgccccatatgaacacaccgggtaaaagtaatcggttagaacgtacaccactcaatcgaaccagatgtggtgcgaccagtcccacgaagccaatcggcccaattacacttacaatcacagcggccagcaatacagcaagaattaaccctactgcacgagccaatgtaaccttttgtcccaaggaagaagccgttgattcatccaactccagcatatcccactgtctggacaggattaacgcgagaagggtaataccaaccacccaaggcaaagcataaaacacaccactccagtcattctggacaagtgttccggagccccaaaggaacaacccttgtgtctccatggagaaaaaaatatgtaatgcacttgtaaatgaaccaagcaccattgatacaatcataccggacaacgcaagtcgaaccgggcttgatgttcgtccgccgcccatgaaataagccgcaaatgctgccagcaaaccacctagtgctgcgaaaagaaaaggcgactgacttaatagacctggaaaagcgatagctcccagcaccaccacaaagtacgctcctgcattaatgcccagcgtatctgaagcagccaatggattacgagtaatcgtttgcagcaaagcgcccgcaacagccagtgcgccacccgcaaggataccaatcactgtacgcggcatgcgcaagtcccagaccatattgtgctctaatgaatcctgtctgcctgtaagagcgtcccaaacaacatgcaaaggaatggaagcttctccataacacagacttacaaaaaaaagcacgatgagagcggttagaccgcccccatatatgctaattgtgcgccaattcatagctggcttagatccttgaaccgaactcatttggtaatcgcctcgactaccccatcaaccaatactttggaggagatcggtccaccaaatgtccatgttgtgctatcgagttgatatgtgcgtttttccttcacaaagttcagtccgttccataccgagttatctttcatagctgtgccaaagacgtcatcgtctggttgtgtaatataaatgaagttactgtccttcacatcggttaaggattcaatgcctactgtagagaagccatagttttcaactttgtccggctgccagtcgttaaccagtccgattttgtccaaggtaccaatcacaaccgagttatcggtaaacatacgcaggctgactgcattttgatatgtgaacgcttgtgtcagtgcaaagttgaagttttctttccccgcagcagccagtttttctttggcttctacatagtgttgatcgagatcactaagaacttcttttgctttgtcttctttaccgagagctgttgcaatgttattaaagatctctgtcatcttgtcataatcatagccgtcaccatcatacggatcatattcaatcgttggagcaatcgcgttaagctgatcgtagaccgccgtgttattatctgcattagcaatgatgagatctggcttcaatgcagcaatagcttccagatttggttcactgcgtgttccgatatccgttacactgtcatccagtgctgcttcggatgttacccacactttatagttagcgttatctgcgttacctactggttgaacacccaaggcaacaacatcttccgtatatgtccattcaagcgtaacgacacgttctgctggcttgtccagcttaagctctccacgtttatgcttcacggtaacaggacctgctgtctcttcagccggagcactacccgagccactaccttgacttgtatcagttgtagtcgtggttttaccacaacccgccaaaaccagcacaaaggccagcataatcaacagtccattcaacccttttttcatatctcttttctcccctgttaatatgtatttatatgataacaattatcattatcactattggattatgccgtaggaatggatttttgtcaatggaaagtaccttattcccattcttttataaaataaaaaaaaggaaagggatagctcaaaagccatccttcccttccatcgcttctctgtttgcattaactcaactgcatcgtagtgatgcatgtattatcattttcgtatgtagacaattgcgtttctgcaacctttccatctcgaacaatacgaatgagataggttctgtctcttggcacccaaaaatccataaatccgttcgtaccagacttcatcacttcatctttcataaaagtgttgccttgagaatcgtgaatggtaacgctaaattccttattgctcatttccccctgacaaccggtcaagctatgaattgcacagggatgggtctggtccacatagggcgcaatggaaaggaaaaattcgttctcaggcaaatcgtatgtaatggttttttcatcttgatcggtgacgattaactgtttggcagtgatggaagcagattctggtgtttcttttcctgtgctgatatcttccaccaattttcggatgttgggcgcattggctgtacccgcctcttccttgcccgtattgcttgcaaacagataggttccgattacaattacaactgcaacacttgcaatgatccacatttgtttcttcatttggagtccatctcctcgtccgttttcattaagtataatagagaataaactatgatggacttaaacatcgagaaattcaccagatattcacatatatggttggctcatttcgggatatgcatatatgatatctggtcgataagtcttactgctcattgcgtgagcgacaattaatatgccataatccggtctgccatttcctcggcttgaagtaccacagacaacgggtcggagaggaaatatctattccagtcaaggctaataatccggcagtgatctgtctcgatggacttctgccatggtttgcctgaagcttgatcaagtccgtgtcttggaccattatccaacaccaacaggtagtcctccaggtacccacctaccgcactccgcgcaatatccaggtattccaggcccggctccaatagttcctggcgaaccttgcctgctggcttcaagttcagtaacccgtaggctgccttacctccacgagttcccgtatttcccacaagggtaatatgttctccccagttcggatcaatgacggtaaatgtcttctctgccgagaccttgcccgggatcgtttgctgcaaagaatgtactctccgcccgtattccttaatccatgtttcggcttctgtctggcgattcagaatacgtcccatctctcgaatcccctctgctacagagccgtaaccactccctccatagaccaccgtaggcgcaatccgggcatacgaagcgtaggcagcaggattccaggtgataatcaaatcgggctccagttcaagcactttttcgagcgagataaaattatgattgccgatatcctgtacttgatcatagatataaggctccagcatttggttactttcaatgagtgaatgcggcgctccgagaggcgtcactcccaatgccagcacttctcccaaattccagtccacgacaacacggctaggcttggtcggtatcgtaatctcgcccatgcttgtggcaagttttagaattctggctcttggtaccgccggcgctgggggtttcctcacttggactccttgtagatctataatcttctgttttggctggtttttgtcagcttcaactataggtaccattcgttcgctccatcccgaataatgactttccagagcggcatgtggttgggatgtttgcagggctacatctggagcaccgcactctcgacgctttctgtaaaactcaggagatacaccataatgtttcttgaaataacgacttagcgtgtagccgttctcatagcctactctctccgcgatttcttgtaaggtcccattcgtgctcaccaatagttttaatgcctgttccatccgaattcgtgacagcacacggctaggactcgtatttaattgaagctgaaacaattggttcagataccttggactacaattcagcatttcagctacctgttctatcttgagtggttccccgtagtgacgtttcatataatgcaccgcctgatctacccgattcagcttagcatcgttaaacctctgctcctgcatttgtttcagcatctcggcgagccattggtagaacagcgccttggtttgaatccggcctgctgactgtagttcattccattgtctgtatatcaactgcatgatttcaattaatggcaatggacacgctggttcaaaaccaaaacttacttgcaaagactccgacccagtatatgtttgggatctttcagtatttggcttctctgactctggtgacgaataagacaacatatgtatttccatcggcttcttagccagacaatccaggctcgttcctttggaggcgtgcagaatatatgtccctttgatgtgatgcattgcctgaccgagccagatcttccccttgccatccgttattaataaaaaagcattcgagggaagcgtccacgtattaggatcttcactgatgttaacggtaatgattcgaatatccagtaatcggattgttatatgctcccataatgccccgtattcttctatgttcatcgtcatggacctttctttgtgtttcctcgttactacatccaaagcttcgcctcatcatatatgataaccattctcaattcaacctgtcgatctgttctgaaatggttatgcttccgcttccgaattggttattgtgcaatcgttagattgtctctagagttatattaaatgaaaatcattatcaattagaaagagggttcgtcatgttgtttaagaaagcttggtatcgtatcaccctgcctgttttgctgatcatggccgtattcattagtggttgtacccagaaagagaccgtgaaacctggggcgacagaaacaggaaacatcgcaccgcaaacaagaacactctccacgatgatgggagacgttacagtccccctcaacccggagcgggttgttgttgattggaatataggacatgttctggctgtcggtgtaacacctgttggtgtgccgagcagtctgctggattatggaatgttcctgcgtgacaagcttgtggatagcgcggacttgggtaaccatagtgaggtttcacttgagaaaatggtagagctggaaccggatctgattatcacatgggaccaggagaaatttcagacctattccaaaatcgctccgactgtcgtattcgtacccgatcagtatgattccatggaagcagaagtgacagccatgggcgagattctgaaccgcgaagcagaagctataacttggaacgaatcatttaaacaacggatcgcagcagctcaggccaaaattaaaggtgtcattccggacggtgccaccttcaccgttgccgattttaactttttgaagaacccagccattatcggcaacagcgccaatcgtggtggaagagcagcctatgaattgcttggactaactccggcacccaaggtaaaatcagatcttctggaccaaggcaaagaaaacctggaagctagcgcggaggtctttggagagtatgtaggtgattacctgctgatgatggttacagaaggcacgaaagatcactccctgttgcctaccgtctgggacaatctacctgcggtgcagaacgaccatatctacaaactggatattcataaatatttcactgctgatccctatacctccattctacaagccgaagagatcgcagatcgactcgcaagtggacagactgagctgaattagcgcgagttttcaaatctagtgagacccgaaaccgaacctgaacgtgttcagcgtaggcaagcgcactgaatcctgaatgtatgagaacgtgcccttcaagtgagagcaagcgattgagacgtcgtaaaagtagattttctcccttataatgaaaagcttcgcttcaggcggggttcagggtcgttctctcggctcgccgccggttagatcaaaacatggagcgagcgctaacgaatctgtggcgtcttattcaacgatttgaagcgcgtgcagaaatctaaggaacttgagacactctatatccgattaacaagccgttttcagtgtttttataaggggattttggtagataacgtgtctgatgttccttacaatttaaaaagaggagctgaaggccaaataagatgtcctgagttcctcagaaaatcatctatccattcgccaagatcggcagtctggtgattcaagaccctttatccatctcaaaaaaggttacacaaacagcgcccaccagatcgattcaggtggcgctgttttatttggtatgaatatgtcgctattttcaatatggatacgtcgacatattttatctaatcacacaaataagtgttcatatctcaaaatcttgctgctactgacaaaagtcttacgagaatctttgcttacctgcaaaacggggatggacatcagcacaagacaactcctcattagaaaatctaatccagacataatcatcatataacacaccatgtgtttgttttacgatctccgaagctacataatcattcagacccaatgattgcaaaactttatcggcatgatgtctggtgcgagggaaacatcttgattcgaaataatccagtacatcccctacggtcaccttggacttgtttggaaaagggagaaaaacaggcgatacacttttatcttgccatacttcaaccgtttgattgctataatccaacttcactttggcaatcacctggtcatgctctaagacctcaaattcaagaggagaagatataaatttgtttatttttttcatctgctacctcccatagtgatctttcatatttctttgttatgattatatcatttcttcaacttgtatttcatttacttacttcatcattctattgaaaaaagcccgacacaagttcgaggaaatctcgaacttgttcggtttcttcagattgccttccattcacgcaaacctatctacgtattggagagagctttgtttttctcataaaaccgggcgttgtgagaagatacaccggccatatcggaagcagcaggttccagatacgtcttggcactgttgactgcgagcaccgcatcgttaaaagcacctgcgatcagtcgaactttgcttccataagtgataaagtcacctgctccaaatatgcctggaatgttggtacgcatgcgctgatcaacggatacgccgtaatcttcacgcgccagtccccattgcacaaggttaccaaaatcacgatcatatccgtggcttacgacaacttcatccacttcaacatgtgtgatctcaccggtttctacatgggccagctcgacacgatcgattttgtcacctgtaccgtataagcgtgagatgctaaatggcgtcatgacgttggcctgagctttcatctgagcaactggcgactcgtgtccggtaaattcatgacgtctgtgtgccaccgtaacttcacttgctattttgcccatttcattcgcccagtcgactgcggaatcgccaccacccgagatcagaacacgcttcccggcaaatcgggacaggtcggttatcgtatagtgcagatttgtcagctcataccgattggcaccctcgacatccagcttttgcacctgagtcatgcctctacccgcacataataggatggtacgtgtgtaatggcgctcccctgttttagacatgagtacaaatacaccatcttcacgtcgttcaagctcagcaatttcctgcccaaatacaatcgttggatcgaacgttctcgcctgtctttccagcgattcaatcagcttctcacagcgaatcggatcaaccccgcccacatcccagatcagcttctccgggtacgtacgcatgaatccgcccagttcttgtttggcttcaatgattttggtacgcatggctctcatgccactataaaaggaggcgtacattccagcaggtcccccaccaacgatggtaatatcgtagatatccaattgtgtctccatcgtcatctatggcaccaacttttcaacaacatagtccatcaattttacagagccaattggacccacacccgatacgaattggcttgtcttcaacgggaagacatgatcattcttcacagcctccagattcgaccacacctggcttgctttgagatcttccatagatttcttcgtgtcataacctacgagagttctgtcttccaggaaaatataatccggattcatctcaggcaaaaattccagggagaactggctaaaccaatctgtagagtctttgatcgcttcaggactattcagacccaggatatcatagaagaaaacactgctgcttcctcctttgggacccatgaaacggtaacgattgtgctccacccggagaaccaatacggtcttttctcccaaggctgccgcgattttctctttcgcttgtgaggctttctcatcgaattcagccagtactttggcagattcttcgttcttgtcaaatatggcagccagctttggcatagcacgtttcatttcactgttggcatcaagtgccactgtaggagcgattttggacaattcatcatatacgccctgttccattccttcgccagctgcaaggatcatatctggtgacaacgcaagcaactgctcataattatattgatattgctcaacttcaatgatctggaccccatgttctttcaaataatcagggcggtattccgcttcaacttctggagttaacaaaacgatttggggtgtaacacccatttcaatcagatactcggcatagatcgaatcaaacacaaccagattttgaggatgagttggaatcgttacttctccaaactgatccttcaccaccttagtcccactttcagtcactgtttcttctgcagtactcgctactccttcagttggagcacctgctgttccagctgttgcgttctcttccttggttccaccggaacatgccgccagcattacactaatcaccaacagcatgataccaaaccctttaaatcttcgtgacatgatatacttcgccccttatgtatattgataatgataattattatcaaatagtatcaaataagaagtgttgcttccatagcatatcgtgcgtattcagttggattattgtgctctctcatgaaaaggttccgtaagatggcgaacgatctgattcagaatcagagtgtgtcccgtaattccgtgaccgtctacccacaggtgagtatctacgtaaaatacccgattattttttacagccttcaggtcattccattgcggactctcccatagtttcctcatattctcttcagcactgaagtgctgcatgatccgcttctccacaaacagataatcgggattggcttgtgtgagtagttcaagcgaacatgggttaaaccatgctgtacctgaatccagtgcttgcggcagtgttaatccaagctgttcatataacaagtgtgataccccgtgtgaatgcccacccagatatcgataaccaaacgcttctaccctcagcaacatgactgtggccgcggattggatgaagggttgcaactgtcgcttagctacgctgacttcgtgtttcatctgctgatgcagtttatgagcatcttcttctttaagaaaccaggctgccaattgatcgagcattggttctacatcttgatgaagtccggttagaatcggtgcaattgtgcgcagttcccttttaacctcttccatcaatacgtttcctatcaacatttccggttgaacttgtcgaacaagttctatctccacctcatactgtgttacctccagcatctctactccatacgctgtaaattgttcatggtgatgtggggacagcaggattggggtgaccactacggcatgggggatgacacccagatgaatcataatttctgcacagattggagaaagtgacaccatcttgcgctgcgtcatcgtctgcctatatatcttaggtgatacgccagtcaattgtttgaagcgccggctaaaataatgagcatcttcaaatccagactttttggcaatatcctgtgaggttgcagcggttaatatcagttcttcctgcgcgcgatagatccggtagtgggccagataatccagaggtggcttaccatatcgctcactaaatttgcgggagtaatgccatggactgattccggcaatctgagctaactgtgtacgtgtaatgacctgatcataatgctgctgcatgtagtcaatggagcgaagtataccgtgttctggtttcaactcgtcatgcggctgtttccgatatagattacttaacaactcatataataaatgctgattgccaaccctttctgcactctgatcctgtgaatgcacttcactacaatgctgaatgatacttgccaaacctccaccggacagttgcactttctgatacgcctctcctgacggtaaccgccattcgaacttctgagcttcccgtctatcatgcagcaccgaatatgtatcgaactgaacatgccagcctgccagatccaggttgccaccttcaatgacctccattacggagttctcttcaaccgcaattaattctccataggagacgtgaactcggtgtccatttatattccagatcgcttttccatcaatgataaatatcaaggtgtgactgaaaaagtgatgcagctcgccttttgttatccatgcgttgcttagtgcattcgttgacttccattgagcaatccattccatgttgtcagacataggttatcctttcaaagggattagtaatccagatttatagttttcactatatcaaaatacatgacaactccataaccaacaaggtatggcttgaataacatggaggacagcgattatacatttcataattacattaatcagaaaaacacaacaaaaaagcccgtaccacaaggcacaggctctttcttacaactttaatactacttttcaatgctacgttttacgtattactcaatgctggctttcggtgacccctgtccccgtttctgtccttttcctgccatccaatacgttagtccacctgagacaccaaacgcgataaccacaccaatgcaagtgtgtaacagattcaggctaccctcttcgatgaagagcgggaggctgaccaagctcggattccccaccatagcaaatgccttgacagataacaatccgaaatatagtccacccgcagctccacccagcaatgccgcatagaaagaggatctttttctcatgttgaccgcatacaatgcaggctctacaactccaaggagggctgttccagtagcccagaaagcaagtcttctggatgttggctctttcgagcggattccgtttgcaagcgcagcccccgcttgtccaacaatcgccactaacatggcagcaatcaccatagaaccaccattcataaccatttcattaatgatgatggcaatcagccagtagtgtaatcctataattaacatcagtgagaagacagctcccagtaacatcaccgacaacactggagcattagctactagtgaatccaatgcctccggaagatactcatcaatccaggttccgactggaccaagtatcatcaatactagcggaacaagaatcagtaacgtcaggaatggagcaaccatccctttggagaattttgggctccatcgttcaacgactctttccaagaaggcggctgcacagatcgttagaatgacccagatgggcgtagagtaaaaagcaggctgagacacaagtggcaaacccaggaaatgcacctctttttcccctgacatcagcatggtcatctccggataaaacatgagtccgccaatagatgctgcaacatagatattgctcttcaaccgataagctatgctgattgctaccaatataggcagtacataaaatacaccgtctccaatgatcctgaagatcgtaaaggtctggctgtccatcaacgcagaagagtccgcagaactgtacgtatccattaacgcaataatggcgactataattttaataacagcggctccgagaatcgcaggcatcaagggcctgaatacatcggatacaaaatgtaagatcgagaatccgtttttcttcgcgtgtcccgcttcctgcaacgctgtccctgtagattcccaagcgttcatacccagtaacgtattgtagataagtgaagattcatctcttattaccagacggcactgctcacctgttacccgaatatctgctacaacatctgcggaggcaagaaccgacatgttcaattgtgtactttccttcagtgctagcgtcgtcgtgcccttaacgtgttctacgagcttgatgttctccttgcctcctgcgagtttcaaccaatcttcaatctgtgtgtcatgcattatgtacgatctcctcatattacggtaaacccgtgttttgtgatgtgttatgatctaatatgcctctatctatatacacatttccatgaaaaaacttcaataggataaaaaaactaatttccctgacatttcatgttcatttatacaaggtatatggacctatgaaagtcgaaaaagcaaaaaagcctacttttatgtaggctcttatccatctgtacttatgagtcatactcttcatactcacaaccgacattcgcagtcatcagatggcgatgcacgtaaatatacatcctcatcctatgacagtgccaacatcgcgttcatatcttcttctgccgttgtaattaactttagaccaaacatatctacgagtacatccaagacaccttccgatataaactcaggcggttttggtccaatacgaatgtcctgaatgccaaggctgaacaggccaagcaggatcgcaactgctttttgctcaaaccaggacagcacaatactgacaggtaactcgttcacggtacagccaaaagcatccgccaaagccattgcaattttcaccgtagaaccggaattgttgcattgacccagatcgatataacgcggtatacccgtgtctccaaccgtaccataatccacatcgttgaagcggaacttaccacaggaagtcgtcagaattacggtatcattcggcaatgatgtcgcgagttcacgatagtagttgccgcctttgcctggtgcatcacagcctgcaataacgaagaaccgacggatatgaccgtctttcaccgcttgaataatctctggcgcaagcccaatcacggtctcatgatggtaccctgtcgttaagacttgctcggactgtatatcggccgcaggcagggacaatgcacgttcaatcagaggtgagaagtcatcatccataatcttggcaacaccctccagacccgccacttcgtatgagaaaaagcggtctgcatatgtgcctttgatcggcataacacagttcgtcgttgcgagaatcgcacccgggaattgttcgaacagtctgcgctgatcgtaccaggctttgccgatattacccttgagatgggcgtatttcttcagcgccggataaccgtgcgcaggcaacatttccgagtgggtatagatgttgattcctttcccttcagtttgacgaagcaactcctccaatgcatacagattatgtcccgtcaccacgatgcactgtccttcaatctggttctggctaaccgtaatcggttgcggtacaccaaaacggtccgtgtgcgcacgatccagcacatccataatgcggattgctgcattacctaccttcatcgccatctccagatgttcctgtacattaaaattcgagttcgttaatgtcatatataatgcctcatgtgtaatccgatccacctcaggatcagaatatcccaactggcgtgcatgtgtcgcataagcagcgatgccttttaacgcaaaaatcatcgtatcctgcaaacttgcgattgtttcgtttttgccgcatacccctaccacggtacacccgccactcggcgtctgttcgcactgataacaaaacatatggtttcccctccaaacttagattaaacgcagttcgttatgtaatagcgtaacagaccctgatatgagctagtgtgatggtgcacacagtttctgatccaacatctatatttggttctccagattatcatccaaactggaaataataacattcaaaaaaaggcatatctcggatcattatgaaaaatactgtgtacagctaaaaacgtataaatccataatcttaaaaaaatacgaaaatgaaacgattctagattttgcccgtaagggtaatacacagagaaatctaatattcaaggagctggtcaattgcaacattacagacacagtgcggaggaaacccttcaggatgtacaaagttcctccaagggacttacgacctccgaagctgccaagagaattgaaacggaaggatataacgagttaaaaggtaaagatgcaacacccgtctggaaattgttcctcgaaaatttcaaagatccgatggtcatcgtgctgctgattgcagccgcggtacaggttgtacttggacacctgattgaatcattgatcatattcctggttattttgctcaacgcggtgatcagtgtagtgcagaccaaaaaagccgagagttcacttgacgcgctgaaacaaatgtctgcacctgaagcaaaggtcattcgtgacgggcagaaaaaaaccattccagcgagggaactcgttcccggtgatattgttatgctggatgcaggtgattatgtcccggcagacgggcgtatcctggaatcaggaagtttgaaaatcaacgaaggcatgttgaccggagagtccgaagctgcggagaaacacgccgataccatcccggatgaggctccaatcggagatcgtcgcaatatggccttcagtggctcactggtcgtatatggacggggcatgcttgtcattacaggtacagctctcaaaaccgaaatcggcaaaattgccgaactgattgaaaatgccgaagccaagaacacaccattacagcgcaagttggaatcattcagcaaaaaactgggctttttcatcctgggcttgtcgattctcatctttggcattgaagccggtcgtgtatggttgaccgaaggtacggagaatatcgggccttccatcgtaaatgcactgatgtttgccgtagctgttgcggttgctgccattcctgaggccttatcctccattgtgactatcgtattgtcactcggaacaaataagatggccaaacaacatgcgatcattcgtagactgcctgccgttgaggcgctcggctctgccagtatcatctgtacggataaaacaggaacgctaactcagaataagatgactgtcgttgattattacattccccatggcaccaaggacgaattccccgatgatcccgatcagtggtcggaagaggaacggcgtctgttacatattgcagtgctctgcaatgattcaaatattaaccaggaaggcaaggaattgggtgatccaaccgaagtggccctcattgccttcagcaaccgggtgaacaaggattacaatgaaatccgtgaccagttcccgcgtgaagctgagcttccttttgactcggatcgaaagctcatgagtacggtgcatacctttgagggacagacggctttgctgaccaagggtggacctgatgtgctgttcagtcgctgtagtcatgtgtttatcaacggtgaggttcagcccctcacacctgagattcgcacacagtttgaagaaaaaaatgaggccttctcgaaacgtgccttccgtgtgctggcctacgcgtacaaaaaattcgatgataaaaaccaggtcaccattgatgacgagcatgatctgacactggttggtttgacagcgatgattgacccaccgcgtgaagcggtatacggttctattgaagagtccaaaaaagcgggcattcgcaccatcatgatcactggagatcacaaaacaacggctcaggcgatcggtgtggatatcggccttgccgaaccggatgacctcgccattaccggagccgaactggacaaaatgtctgatgaggagctggatcaacaactcgaacatatctcggtttacgccagagtatcacctgagaacaaaatccggattgtgcgtgcatggcagcgaaaaggtaaagttgcagccatgaccggagatggagttaatgacgcacctgcgctgaaacaagccgacatcggcgtagcgatgggtagcggaacagatgtcgccaaggatgcggctgccatgattctgacggatgataactttgtctccatcgtgaatgcggtcagtgttggacggatggtatttgataacatcaaaaaagccatcgcatacctgtttgccggtaacctcggcgcgattatcgccattttgtttgccttgatcgtcggctgggttaatccatttacggccctacagctgctgttcatcaatctggtgaacgactccctgcctgccattgctttgggtacagagaaacccgagccggatgtcatgcgacgcaaaccgcgtgatattaacgagggtatcttcgcaggcggaaccctgcaagctgtgattacgcgtggtgtcctgattggtgcggctgttattgtgtcccaatatattggacttggcatctcggaggaaatcagtgtggctatggcattcacaaccttgattctggcacgcagtctgcaaacttttgcagcacgttccaacacacagacgatcttccaggtgggtttcacgaccaataaattcgtgcttggctccattctggtatgtctctgtctctatgcaatcacactgattccaggtgttcgcggtgtcttcgccatcccggatacattcggctggaatgagttcctgattgcaggcggacttgctcttgctgcagtcattctcatggatgtcatcaagtggattcgcaatcgcggcaaacaagttactgtggcgtaagatctgcagttataacatgcacaaacaggcgcccgttatcggagcgcctgtttctgtatctaattatccctgtttgatgccaaaagcgatccagcgtccatcaatatcctcgatcacaaactccttgttattatagtctgtatgattgagggcacgtacgattttcacatctgcgttgatcaattcctgttgaagctcttcctggttctgggtaataaaatatgcatcatatccatagccatataattctctgttgggtatgaccttctgtccattgctttgggtcaaaataatctcggtaagatcacgatacaggcagatatgaggttccgcggcatcgagatattcgacgacccgaaagcccatcttttcttcataaaactgcgcggttcgattcatatcaagcgtcggaaatacgctatgggacattaataatgcatgagtcatgggtataatctccttcattttcaattcaacatgctaattacttacatatctagttacctaaccgctgatccatctgcttatgtatgcttcaatgatcattttagttaaattcaggaaatccgtctattgtttattattaatatctttctatgctcatcacatccgaatgaattaatatgacattattgccatatgataaatttgggtgtaaaatgatatattgcttttcatcacattttcatcagagctcaatccgaattcatattcatacccaagacaggaatggtaccgtgaaagataaaattgtcatgccactctggacatgctgcttgttcatcgttgtgatgaataccaccatgttcaatgtttctttgccagtcattattcaagatctacagattacctcggacctggggtcttgggtcatctcaagttattcgattggttacgccctgtcgacggtgatctacagccgattgtcagaccgtatcccggtacgcaaactgttaacggtcgggcttctgatcctggggttatcttcattgctagggttgttcgcacataactttgcaatcctgttactgacacgtattctgcaatctgcgggtgcaggagttatggccgggctgggtctcgtcattgcaagtcgttacatcccggtggaacgacgcggagctgccatcgcgctgatctcatcaggtagcgccatggcttttggacttggccccattgtcggcggactcattagcgaatactggggctggaacggactttttgccataacggtgcttgtcttgctcgccctgcctgtattgctctatttccttccacgggaaacagtcaaaacagatcagccgttcgatgttattggtgccatactaaccgtcattaatgccactacacttctcgtcgcgatcacccagcaatcctggttatggtttgccgtgggcgttatttcacttgttgcacacctcctgtatattcgaaaagcgagtcttccgtttgtgaatccacaagtattccgaacgccaggatacacccggttaatccttatcggattctgcgtgctggtggtgaatctgggaaatctgtttttgatgccgcttgtgctcgctgatttatatggacgctcttcgctcgccattggtttgctgattgcacctggagctattgttgcagcattctgcacccgtttcgttggacgctggatcgaccgttatgacaatatgcgatttatgatcatcggacacaccctgctcgcagcggtacttgctttattcatgctcggactggatcagtccgccttgatcattaccagtggttatctctttttctcaccggcactgtcagcctccatggcttcactgaataatgaagcgtcacgtgtgctgcccaaagcgcaaatcggttccggtatgggcatgttacaattgattcagttcttcggtggttcggtgtctgtagccgtgtgtgggctgctgctacacagcattccgggagtctcggtcgagcaagcttatcatgtggtgtatgcttgtctgttgctcgtctgcgttgtttcactcgggttgaccgtctggcatagcagagcttcacgctcaggcattaaacctgttacattggacaattgataattgaggtttaaagttcagaacaaagaggcccgcagcaagcgcgagccttttttagtttggaacagaaacgccgtttttttaaagtagatcactcaatgaacttgaacttaccggttactttcctgatttcatcctacagcagcatgccaactatttaccgtccagtgcgaacttccaggcctccattatgctaattggggctttactactgctctcgccgtcaccttcctgcgtccaaagtggtgggtaatacgcaaatacttgtcctgtctggagctgagacatatcctcttgccagcctttccagcgaaaggtccgatagaactgctccagatcaccattcgccagccagttgatgaaacctgaatatgccagttctgtcgattcccattcgagtgtatccggtgcaaaataatatatgtgtcccgtgcggccatacttgcctgtatccagtccgaagaaaccgcctgccgcatcatatgcaacgaccatcataccttccagcacatctacccaaggttgctcactcacaccattccaactggtgagactccccgatgtactgtcaccacccgcaccaagcaacgtgatccagccatggtccagtacaataccttctgtctcataagcaacagcccccaaataggatttggtgcttatttgcagacgatagagggtatcctctccagcctcttgttttgctggaacatacacatatgtattttgcccactatccagaagttccttgagttcttcccatgcgtgattctcccgatctactaattcagctatcgttaatgtattcatgagcagtctcctcgctgattttataagagcatatcatgggttattaacccgttcaaatctgctataatctatcttcaaagctaaattcaagggggaaacgatttgattcgcgtagttatacttatgattccgattctgatggtgctcgtatccggttgtcagaatcatacatctgccatgaaggaacccgtttctgttcaaaagtctgatccccaggtcatccattacatatcaccccaaggaaacgactcgaataaaggaaccattcaatctccttggaaaacgttgcagcacgcagccgaccacgcttcgccaggaagcacgatctatttgcgtgaaggtgtctatcatcagaaagtcaaaatcacccggagcggtaattcttccgctaatccaaccctattttcaagttatcctcaggagcaggttatcattgatggtaaaggtttatctgtccggggcattgaagggttaattgaaattgaaaatgccagttatctcacgattcaaaatctcgaaattcgtaattttacaaccacacttgggggccaagttccaaccgggatctatgtccacggagcaggtgagcatattcagctgttaggcaacaccatacacgcgattgctagttacgcaactcctgaaggtcccgatttgcggggcagggatgcccacggtattgccatatatggcacagagcaccctcaagctttacgcgatatcatcatcaaggataatgaattgtatgatcttacacttggttcaagcgagtcactcgcagtcaacggtaatgttgatacctttgccatccaggacaatatcatccatgattccgacaatattggtattgatctgatcgggtacgagggtacgtccgaggacgacacgtacgatcaggctcggaacggcattgtacgaggcaacgaagtatacgatattacgtccaataacaatccctcctacggtacagacctgcccaataataccaactcggccggcggcatctatgtagatggcgggaaagatcatatcatcgaccagaaccgggtatatcggagcgacatcggaattgagattgcatcagagcatgccggacgttcaaccagcaacattaccgtgcgtgataacctgatttattccaatagattgacgggtattgccatgggaggttatgacgaggaacgaggagctaccgaggatagcaagattatgtacaatacgcttgtgggaaatgataccctgaatgcaggcaatggacagttattcatgcagtcacggacaaagaacaatacattcatgcgtaacattctcgtatcaggcagctcggaagtactaatatacaacgaatatactagcaataccggcaatgtgtttgaccataatgtctattactcaccaggtgagcaggaagatgccctgtgggtttggaaaaataaagcctactccggcatcgccgcctacatcaagggatctggcaatgatgcacactccatatatgtgaacccggcatttatggatgaacccaacgaagattttcgtcctcaggcgaactctccggcaaaggcgtatggttaccttgcaccgcgataaattaaccctgagtctgccatctcaacttagtaaatctttttcacgcaaataaaaggagcctgtgcatgtgggatcatctccctcatcatgcacagactcctttttgctttcttttgatgtaatccaacccttaactttttaccatctgagctgcatgtgtcacccggtttcgtcctccggttttggaggcatacagggcgttgtccgctctttggaacaaggacttttccgtatcatcctcgactacagtggccgcaccgatactcacagtaatgttatattcaccccaatcggctgaagcaacctgtgaacgatatcgttctgcaataccgatcgcctgctcctcttcacaatctggaagaatgacaacaaattcctccccaccgtaacgtgcaaccacatccgtacttcgcgataccgtttgcagcagccctgccagattaccgagcaccagatctccgatcggatgtccgtacgtatcattaatgtttttgaaatgatcaatgtccacaacgagaagggagaaataacgttgtttctcctggaacatcagtaagctttcaagcattttttcctggaaaaacctgcggttcttcaatcctgtcaacaagtcggtggaggccattgtctccaactgatcattcactttgattaacgcctgctctttaattttatattcctcatgcagtcgttcaagctccttattcgcttcttgcgtcgcttgatacagctcctgaagcttcgttttggtatgcaaaatatccttctcatgttcgattcgcttacgcatgactacaacgacacaatctaccacgctttccccgttacgggtctgacgaacaccgttaagcagaacaggaacagcctgctgatcacgggtacggaacgtgaagtacatctcgtccacatgtccatataactggatgtagggatagaaatacgtatggaaaaacaccttgttgctcaccgacatggtggattcaatatgttgccctatgagctcatcgcgttcatatccaagcatcgtaagcaaagtttgattaatcgactgtacgacgcccgaatcagagatagagaagtatccacagggagccagatctaattgtatatccatggaataactgcctttcttccgcgttttatgcgctcgttaaataatccttaatcattcggatggtttcttccggttgacttagatgcggataatgtcccttggccgtcatctgttgcaacctgctattcttcagatgggcgtgtagataatcccctacttctactggggcaatgctgtcatccgagcactgaagaattaatgttggcacagttgcctgctccagatcaatacgacagtcagataaaaacgtcacttcggcaaattgtctcgcaatatgcggatctctggagcagaagcttttctccaactcttccgtcagctctttccgttccggattgttcatcacaatgggtgccagataactcgcccacccaataaaattcatctgcatcatctcaagcaattcatcgatatcattccgatcgaaacctccataataattaggcagatcattcacgtaacgtggggagggccctaacattataatttttttgaaatatttggggttctgaattgatgccagcataccaatcatactactgacggaatgcccgacaaatatggtgtcctttagttcgagcgcttccataacttccagcacatcctgggcgtatccttgaaggttgctatatttgatagcatcataatagttaatttgagattcgccagatccaacataatcaaacaacaccacacggtagttctccataaaacctggaataatgtaacgccacatatcctgatcacatccaaaaccatgagcaaatacaatcgtttggctacccgagccaagtaccttaacattatttcttacaagtatatcaacagtcactacatatcacctctccgaggtagtattcacttgaatcattttatctgattagtataccggaaaatgttggaatatgaattaaaaataattaataacttctctcatccaccaaaaaaataaataagaggggtgtcccaccagccatgttgatgacttttgggacagcccccctatttctttatttcacagttaggatcacacgttgataatgcttcaactgatgctctccatcatcctgtacttcggcaacgatatgaagagtatcacccgatttggcatcgtcaggaacggtaaatgtcaccgcttcggtgtcactgccctgtaattttatcgtatccacctgctcatccttggcaagttcacgatgcaatccaagctgcaggtcacccgccatttcaggctgaactttgttcggtgttactttggaatcctcataagtgtccgcttcggaatatctccaccacgtataggtcagttgatctccatccgggtctttaccctccgcgtgaagagtaacttcctccccaggactaacgctaagatccaccccttccttaatcgttaaagacggattatggttggcaccttcgtaagtgtctgcaacggcccagtctgcacgtgctgcaaaatcatcctgcacatcgtcaaaccatctcatcagagagtattcggcttcatagcgtttggtgtagggatcgtaatcaagcacattgtttctaaacagcttgtcgttcacaaccccaaagcgtccaccccaaccgccgtaggaagagtcttccatactgcgcagcccattatcaatcagataaaagaaggaaggagagtcaccctcagatataaaatcgtacttgtcatattgtggattgttcttcagatactcagcacttccccgttgttcttcggctagttcgccttcgatcattttaccatcacccatcgatgcatacatatccatcagcttgccatgtccgttcagaatattcttgaccatccagtcgccatgaagcttactgttcacttcttcggcatgcatcttccatgcataggcaaaatgccagaagttcgactggtcgttgagaatgcggatatccggccaattcttcgcaatgtattcgttgtagctgtcatcctgatcgaggatgatgtacaggaccagtttgtcactgacttttttgcgaatcgtatcccactcggccgtatctttgtactgttcttcaatcgattttagcgctctggctgtggtattggtgcccccccatgtctgaacaatcaggtctcgggagtcatcatcgaggaaaagagtttcgaggaactcggaaccttcggtttccttctccatctcccctttatcggaaatattaccgatcttggtcatcgctcgaagctgttccggctccgggtacccatccgcatgtttggataagttcgggtagatctcgccataggcatcgatcatatcgtacacccactgtgtgcctgtccagcggaacggcttgatccctgcttcctcgtctccagcataatgatacaccgagctggtcagtacaattccggcaaggtccatttcattcgaatataagaggaaacgaatgacggagttcatatcatccacttcaccgtcagttgtaatcactgttctgcctttggcagcttggttgtttgcaggttcctgggtttcattctctgtctgctctgtcgcctgattcggtgtgtcactcgcggtttgtggcgctttggatgcgcatccactaatcaccaggatgatactgagacaacctgcggcaaaaccgtttaaccattttctcttgttcatagtgctcccctttcttctgtacagcgtgatgttagttgggttggaataagtaagtcctctgtttttctatccttaatatggaccgtagaatgcaaaaaaacccgaacaacattatgaatggaacaaagtccacgcatagtgatgttcaggttttgcctgcccgaagcagtaacaatccttatttgagtgaaagtatatcatgtccactcatgaatgtaaacgtattcaaatgtttttttgaatttatctttgatatagtataatgcttatagccaagaatcaaacgaatcggcctgttattatatcaatgttattaggaggactcagacatcatgcaacaactggatgcggccttgagccgtttggtggaacagcaggatttatataatgaagcttatggacttttcaaaaatcatgatctgcgtccacgcgaacaacatcaccagccggaagtggatacacgaatagctctttctccagaacttcagtatctgtacagtcattatgagatgatggatgcggatgcggaaggtacactcaaaatgaaaaatgccgccgtcgaaatcggtgatgcagcgctgatctcctttgtcgcacctgaacatctgcttcgtcagcaactgggattccgctggattggcatgaatgaaccttatgaggagtcctccacctggccaaaaaatcacgttgtcatcgcaaactttaacgatgatccgttaattgtagatgtagaagcaccaaactctcccgtatatgccgcttttacaggtggagaaccaaaccgtgttgctgattcgttgtcagactttttcagtgcactagccatcctgattgaagcggcgcgcacctatgccggagaagtaaaagatgaagaaacctatgaaaccaagcccgagtatctggagcaagtggaacctttattgcaagatctgttgggagaagagtataccgctcatcttttcgagtatctgtccttttgttaaaacggtgaattgaaggaattggaggggcgcccatatgatctatgtggctttgctacgaggcattaatgtaggcggaaacaataaaatcaatatgaagcagctgaaagaaacgtttgaacaagtaggcatgctggatgtcgttacctatatcaactctggcaatattatttttgccgatcatcaggaacgtgccgatgcgaatgtggagatatcccatgtgttagaacaggccatcgccgccgattttggcttacagatcagggtaatggtgcggaatatggatgaaattcaatccgttattcaggcgctgccagaagaatgggttaatgatgacacagccaaaagtgatgtgatgttcctctgggatgagatcaatgagccctccgtgctggaccagctgcccatcaaaccggaaattggtacactgatctatgttcctggagcgattttatactcagtcagcagagaagatgcatccaaaagtggcatgaacaagcttgtgggttccaaagtctatgcttatatgacggttagaaatgtgaataccacacgtaagatttatgccctgatgcaagcagcagcagagaaataatacagacaggtggagatgatgccacgcagcttgtggcaattggaggtagtctaatgaacagagcatggacattaaacgtcagcgtccgatccgtagagcgggaaccattctggtatgcaccccagactccctggcagatacagggacaaggttttcgagtgaaattccataccaatagggcaatcgacttgcttgctcaagatcaactgcttgttaccgttggtgaggaaggtaccgcgaactgggctgcttttatcggaacagtcgtggaatgcgaaccagactctctcctgctctatacaagtcctcagtacgaggcacagttaatggatattcggaggttggaacgtgaattttctcctttggcttccatcctcggagcgcaacatgtaatcgaaactctgggctatttccctcccttccattatgacgaaattacggatgtgcagctggaaacagtccaaaatatacaatccctctctcttgtgctaacgcataatgctgatcaggaatgggaacagcaggtgcacttccattttgaacatattcagcaagagatgttctcccctgtggaggcatctaacgtttgtttacagctaagtttcacttatgcagccgatcagatccgtgttaacttggatgccgtatccggcttctccgctacattcctatgcagcacaattcatattcaattccattaacccggttatgtaaaaaatcccttcatgggacaacatgacaaaacatctttacagatgttcttccatgcctattaccataaagggatagctcaacttcttcagctacacattttgcatctggtttagtcaatttgaatgcgtctgcgagattgatcatcaccaggacgttttggaatctcgagcttcagcacaccttcttccaatctggccttaatgtgctcctcatcaatatgatcaacatagaatcgccggataaactcgccggaacggcgttcctgccgtatgattcgattggagtcatccttctgctccactatatcattgcgtttggcacgaataatcaattcattaccttgaacctgaatgtctatgtcctctttggcgatgcccggaagctcggcttctaccgaatatttgtcttcttcctcacgaatgtcggtccggaatggatgggagccagttccaaaaggggagaggaatgagttctcaaccatgtcattgaaggatttcaacatgtgtccgaacgggtcttcatttcgtttacgaaacggaatcagatcaaacatgaaaatcagctccttttgtgcggttggtttattggtgttgcttacattgattattataatacccgtgcaaataaggctcaaagtccgtaaaagacgaaaaaaaacgattttctttcatcatggttcactattttaaaatagatccttttttcttttattttgaccttatttgatcttctgactttgtctgactataacgaatgaatggggtccgttacagtattggattcattcttccgcattcccagcatcatgattgccagcaagacaaccagaacagctacgagcataaatggaacatgtttgtccacctgatagagtgtcgttgtaagtaaaggggtaataacggcggatatcccctggatggctgctaccaatcccgctgcccctccctgctgttccttgctaactgccagcgaagcacctgccatgaacccgggcatcatcagacctgaccccatgccaaacaggaaaaacgagaaataatacatggataacacattaaagaccaaaaacaggatcatacttgcgatcaggaaaagggacccgagcaaaatcattgggcgtggctgccatttcaaccatttcatctgaatgacctgcatgatcaacatcgctgctccagagaacatgagtccaaacgaaaccatttgagccgtcgccgctgaggatagagccagttgatcctgaaaataaaaacccccgacaacctgtagtgtcatgatacccatcatcgtgaccaagccggcagcaaggtacattcgtaaaccacgttggaacgggttgactttaggcggttttgcctgaatgaccggtttggctgacgggattaacagcaaggcaataataaatgcagctatcgctataaaaatgccgaaataaagcggccagagcagaccgataagggtaaatgctcctgcaatcgcaggtccaaatactaggccaagtccattcgcagcactgataatcgccatcccgcttccccgctcctccccttctgtcacatcacccatataggcctgggcagaagaaagtacggcaggaataaacatgccaatcagactgcgcgtcacaatcagaagggttaacagtagccctcctccgatccatgcatttaatcccccgtacaatgccagtgcaaataatgcacagctcacagacattcctatgaacccaatcaatatgatgggttttctacccttcagatcactccatctgccccataccggagccatgacagccatcataatggacccaagcgagataataagaccggaatgactttctttcatgcccaactcgcgaataagtggtggcataatgggtgcaatcagcatcagacccaacatggctgcaaatacgctaaaaaaaatacttcctctgattctattcatgtttgtacactcctctatatttcagtacagtacccactgtacctggagtatacaaggctgaatgaatccccactgcctctatacggaacaattcacggcaagacggatttattaataaatctttttcatctcggaaggcttcacgccgaatttgcgataaaattgctgcgaaaaggcactgacattgctgtaaccgaccgcaatcgcggcctcggtgacgttgttatcctgattgcgcaacaacttcatggcgttgtcgagacgaacctgacgcaaatattcgaacaccgtgcttccgaaaagtgccttgaatcctttttttaatttaaaatcgttaagtcctacttgtctggacaatgctagcaaagatggaggatctaccatacaggcctccataatctcccgtgccgtatgtaacttccggatgtcctctctggagaatcccgcggggattggcgccaaatcaaacaattggatcataaatcgattcaagatctccaaggctatcgcttccatcattaaggatgatcgataactattgtttaattctacaatcagactatcaatcatcgttcgtatccggttatccaattgaaatacaatcggcttgaacacttttcgtcccaacacctgattaaacgcaatcgacttgaaaccgcccaattgtgctgctgcataattaaacagagaaaccggaatccccagcgaaaaagacgtatacagctcccttgccggaggatggaaccacgcttcgaaatcatgcataaaaataagggccccttgccctatcgataatgaataatcctgaccggatatatccacatgtcgctctcctgacaaggcaaattgcaattccacaatgggtgtctcagacgcaaaatacgtaggataaggctgatgatattcaacctgggaatataaaatctcaatgccactgtatgttgtcactcttttgaccttaccgctacccgccttgggagagagcagatacgtgtgttcatctttctgactgtaaggttcctgggtcaggtaatgctgatatactacgcctaatgcatcatccgtgcgcatgggtattcacctcgcctatatcttgatcagacttgtcagtaaagaaagtctgaattaattgataatgattctcaattatgattctagcgtattttctcccgttcgaccagtcctatatatatgaaggctcacgtctgcttttttcttcatgtggcaacatcattttatatgctaacttacatatccaatttggaaaaatatctcttatctaaccttttacacaaatcacagacttctcttacatctccttaacataagctccctatactaaaacaattgtacaactcattacacacgaaacgataaaggggatctggaacattgaaaaagagaaatcaatggcttgccgttctgtcgatgactgccattcttactgcaggagcaaccagctacacatcaatgattcatgccgctgacgcaactaaaaccaccaacgatcatgtcgtactgcgcacagccatccaaaatatgcagggtacggtcacatggaacggaagcagtcgcagtgttgatatccagatcgcagatactaaagtacaacttcctgtagggacgtcttcagccaccatcaacggtgtgaaaactcctttggacggtaaaagttacatcaccaaaggtacaacgtatgtatcttcccaaacgctaaaattaattacggatcaactgatcctgaaacaaaataaaaccggttttgaacagaccgcatcgtttcagatgcctggtggcaaagcagaaatatcagcctccacgccagatggacagcgcctgctcgtaaccgaagcggacaatagtagcattgccatactggatattgctgacttgaaaaacattaacgtattaaagacagtcagcttccatgacctctccgccaaagctgaagttacaagcgtaactgtgtccaaagatggtaaatacggtcttgctgttattcgtacaggggatacagacagcgaagcaaacaaagggttacttgccattgtggatctgacaacctacaaaaccgtcaaaacgtatgaactgggcattggtcctgactcgattgcactgtcacctgacggtctgcatgcggttatcgcgatagaggatgaagagctgaatacagctgccgatgaaattgactatgccaacacaaaacgtccgggtagcattatgatagtatcttttgctggcgggaacgtacttgagggtgaaatcaccaacttgccagtatctctggacaatgtagaaggcgccatctatccgcatgatccacaaccagagtatgttgccattagtccagatagtaaaacagcagccatcacgttacaggaaaacaatgtcgttgccatcgtagatctggatacaaaaaaaatcagctcaatcttcgctttgggtactatttcacatcaagcggatctgaaagatgatggtatcgttcagtttaaagagacgatgaccgctcgttatgaaccggatgggattgctttctcggcagatggcaaatacctgctgacagctaacgaaggggacttaggcaagaatgaatttgaggatggtgtaaaagcaggcggacgtaatattgctgtctggaatttgcaaggccagcggatgtacgatagtcagaatctcattgacgaggcaaccgctatggtcggcttgtatcccgatgatcgcagtcccaacaagggaagtgaagtggagaacctgaccgttgctactgtagacggcactacgtatgcagccgtagcttctgaacgggcagatgccattttgttctttgatcttgctgatccggtcaatccggactacctgggtctgattcctacagccggagaatcaccagagggaattcatcgtgttaacggacgcagcctgtttgtgagtgcagatgaaagcacgggaacacttagtttttttgccaagaaatagttcgagtgccctcggtatgtaaaggctgaactgagcggtgtcacgttgtattgagtaggtgggggcgtagagcccctgtcctctcatactattgtacgcgctattccacgtacccacatataatgctgcaaaggttatcgacgcttcatattttccaattcccgcctgttccgctctacttcctcttgtaacactcgtacttccatccttaatgcggatacttcctctttgacgccagacctcttcattacaagatagaaaaccagatataatacaagaccaatcataataaagaaaattaatagcgttataatacctgcaatacctatagagctaatcataactttacgtttcccctttcgacattctattaatttatatttacaacaataccatatttaagcataacgaacagtacaaaaagccaagagagcttgctcccttggctttcaatttatctaaatataccttcctatccggtgatccttattcccagaagaaacgacctgcgaacactttttccgtcaacagtttatacgtttcttcaggcaattcttttttcatctttgccataacggcgtctttgccttgattatattgtgtggacatgccaatctctgccgttgtgttacttgcatctagacgcatgattggggcttgagcatctttcgtccaaggtgtccatgccgctagatcaggtgatccacccgtacctggattgcctgtgtacaggaactgcttcagatatgctgccatcgcggcggataactgatcacgtcctggtttgtttgtatcgctaaagtacccatcagggaaataagcagcaattccgtctgcgtgtcctgtatagaagtccatatccgcaccatgtggtgcgcccagtaacgtgagcaaacgctcagagatgactccaggttgtgtgccccatgcaaaacgatacgcatatactggtggttgacctgcttcactcgtcaattgctccgctacacgctctgcattaaagcctgcataagcttcgctaccatatttcaacgcagcagcatattgttccgccttggttttatcagtaaacagagtctcatccgtaatcgatggagagaagtttggatcaccgaaggcaaaaccggagaactccgtttccaggctgccgagcaatacagggacttttttataattgccattattgatggcgtcaaatccttcttttggaatcactgtgccatcacggaacagatgcgggaatgggtccatacggattgcggttgcaccaaacgctgtgaccaacttgtccgcaggcagtccacgcaggtagctctccagctgtgcctgagattgcttgccaatccatgcttttgcttcttctgggttagccgcttttccctcttgcacgagtagcttcacaagtacatcctcggatttttgctcgccttcttctggtgatgctgtcgtcaatcctccgctgaaagcaactgctttttgatacaatcctttgccaagtggagagatcagagttgccagcacatcacgtgcaccagcagattgtccggctaatgtaacattgcctgtatctccgccaaaaccttcgatattatcctgtacccactccaatgcacggaatgcgtcaagcagaccatagttacctgagtcatccagggcattgcctgttttcagcgctgcattctcgaagaatccaagggctcccaaacggtaattcactgagatgataatgctgttggtgctccgtgcaagctgttcaccttgaaaatctttacctgatccggtcatattcccgccgccgtgcaggaacaccataaccggaagtttcgaactggttgtgtcgggacgccagatattaagatacaacgaatcttcgcttcccgctgtagtcttgccagatatctgcaagctgttcgttgcaaattccttagccgatctcgttcctgtccatgattccggttcttgcggggctttccagcgcagttcacctactggcggtttcgcgtaaggaacaccgagccaaccgagcgtgccatattgctcataggtcttgccatcaatcgcgccatacttggtctgttgcaccgtttgaggtttgaacgacccagcttctttatgtttcaaccaactctgctccaaagttccactgccattcttgagctgtatctgcaaagcctgtgcggttgcctctgccattaggcggttggtaagttgactcgcgcccttcccttgaagcgccatgattcctttcccagccgcataggtggaagccgatccctgctcataatccgtacctgcttcatatccaagcaccttcagcagcatttcggcataaccttccgctgtaaggggtgcattaggttcaaacttctccgttcctgttacgatctcagacacatatggatgctgcttcaagtaaccaacgaccggttgcaacactttgcctgcctgagccgcatcgtcgtacgtttccgatccctgataagcgagtgcttctttctccaatccggacaaacgcaagtaaagtactgcggcctgaatgcgtgtagcctttttgttcagataagctgcattaacaccatgaccgctaccgcgaataagctcggattggatcagcttgtccatcgctgctgaagaagaagttgttgtgttccctgctgcataagctggtagagcggatacacataaccccagaattgttgccacggcaatcgaacgtttaatggttttcatgtcataaatctcctcgctgtcgaatagtgtgtgatgggataatttcattggaaatgttcagttgaaatgcgtatctaagaatcagtattccaatgtctggatgagtctatatctctatttatgaaaaattaaatctgctgcgctcctttctgctcgaaatatctgctacggcgcttgcggtcatgccatcaggcattttttttatataaaaaaacctgaatcgaaggcaaacagacatcgctttagcgtggtctactgccctcaattcaggttttgcctgcaatcagtaacaaccctgaggaatgaggttcattccatatgaaaatgtaaacgcaatcaatcgtctgatgaacaaagaaccaacgaatgaactgacacaggtattgccctaaacacggttacaatcctgttgttatggtgatgttagcacataatgtaagcgttcgcaatattttttttaatcgtcaatatatatctctgaatgggtaacattaaaaacaagctctgcaagttccatatcatatcgaatcggaacctacgttgattcgggtatctgcctagccagaagcccataaatattgagcatggcggtcgctgcgcccagcggttgtaagctttaatcatacagaaccgccgacataacaaaacaggccataggcgcatcctcctatgaacctgctctgatataacgtgatttgcgtcaaatttgtagaatgaaatgtttttttattcctgtagcttgctcacttgctcaatcaggctatccagccccttgtcgaccagataaggtccataattccaatagttgcgagaaacattaatgatccgatgatttttgatcgcaggaatactctgatacaccggctcattgaatagctccatcatctgctccatctcttcatcgtccatctgagtgaagaagtagtctgcaggtttatccgccagcttctccaatgagagcacggttccaccatctgcataggctttgtactgttcaggcataacaaatccgaaatcctggtatatcaacttgcccaatgtaccgccttctcccccaagtaatacctccttattgtagataacgaaggacatggccgttgttcccggttcaatattgatgttcagttcatcccggatcccattcaatttactttcgaaagtagcaatccatcgctctgcttcctcttttttatccataatctcacccatcgttctcagggtgttgatgacatctgggtcaccgccccaggctaccgtaatcgtaggcgcaattttctcataggtgccgatcacttccgtgcttgtataatcaggtacgatgatcagatctggctctagatccgagaccacttctacgttccccgttcctgatccgatatccggtacattagccatctcttccgggtacagatccagtgtttccttgttggcacccgccggcttcattccgagtggcaacaaataccccccatatgtgatcacaaccggtttggcagattgggctggaatctcaaccgttctccccgatgcgtcggtatacattttggttacaggcagtgaagcatcttcatttgctgttgactgtggatcagttcctcccccgcaagctgctaatagcagggataaactaaataataaactgaccgccaaagtaggcttaaaacgaacattcaagtcattcacgctccaagtgttgtattgataatgattatcgttattatcaatatagcgttgtgtgagttctccagcaatgaacgattccgacttcttattagtacgatttgaacctttaaacagatgactgtgcattttatattgagcaggagtttctcccatcattcgtttgaagattcggctaaagtagtacaaatctttatatccaacgctctcagccacatcacgaatctgagcctctgtctctgttagcaatactttggcttggttcatccgggtttggatgacgtattccatcggactgcaaccgaattttcgcttgaatacccgtgccagataatgactgctgtaatgaaattgggccgccatatcctccatggacacgggatgtgcgtagtgctcctgaatgtatgctgcaatctgctcagctaattctggaggatcagctacccgatcactcgcctgcttccattgacgaaactgttcgtatacaaactgatacaacagtcctgtaacctgcaacctgtccaattcttcgctgcttgcccagcattcatgcattctctccattatgggaattagcaacagcggatatgttgctgcaaaataatactgctgcggggaaaattcatactcttgttgtacgttttctactctcgacgggtcggtaccagtggagcttggctggggtttatataaaataagataatattccaaggggagatccagacaatggatatgtatagttgtgcctttgccaacatgcagaacctgcgtctggttggacctgagcttttctttacccaaatgaacaatggcttctcctctgaccatcagcaaaaaagcatgggctggcaaaacatacggcttaattgcctgtcccggcttcaagaccagatgacgaatgtccatgagcttcacctgatttttattccaccactgaatggcttctgaccattctttcattacaaaccacctcaaagccgatcattagacgaggggcattccctagcccgattttctccttaacatacaagagtggtcctcattttgtccagttcacctgaattccagcatccttcactaatcgtaaattttacatatagttaacccatttcatacgttagtttagcaattgttgtatacacttggtttgggataccaactatacatatattctaggaggatgcattcatgttaaaccggtttaatgtccgtgcagccaaaatgatgctcgcggtgacagcaattgttacggctacactcggaggaagcagtgcagcgtgggctgtggaagataccacctcaacgacatctgcatcaccgatcaaaaatgtgatcattctgattcctgacggtatggctaacgatgctaccgctttggctcgttggtataagggctcgtccctgacgctggactccatggcaagtggcatggttcggacacactccgccgatgcgccgattgccgactcagctcctgccgggactgcttttgcaacaggttataaatctcataccggatttgttggtgtactgccggacaaggctaccatgcctgggcaaaaggctattgcgcctggagacgaaagaaaaccgatcgcttctgtactggaagcttccaaactggcgggtaaagcaactggcattatcgctacatccgagattatgcacgccacaccagcggacttctcctctcactatccggaccgtaaaaactatgatgcactcagtaaacaacaagtctacaatggcatggatgttgtattgggcggaggtagcaaatatcttgagccagccggacgtaaagacggcgagaatctgatttcgtccatcaaggcactgggttacgattacgtcactacaccagctgcaatgaaagcctccgattcgaacaagctgtggggtatgtttgcacccgcaggcatggcttataatatggaccgtgatccagcaaagcagccaagccttgccgagatgacatccaaagccattgaagtactgtccaaagacaaagatggcttcttcctcatggtcgaaggcagtaaagtggactgggcagctcacgccaatgatccgattggtattatcagtgacgtactggcttttgacgatgccgtaaaagtagccatggattttgctaaagcggatggagagactgccgttgtggctgttacggaccatggtaatggtggactcaccattggtaacaacgcaacttccggcacttatgacaaagagccgttgtccacatttatcggacctttgaaaaaggccaagctgacaggcgagggcgttgaagcgaagctgaatgccaagcgtacaaacatcaaagcagtgatgaaacaatactatggcattaccgacctgacttccgaggagattgccaccattaaagcggccgagccgggcagtcttaactatgcaatcggtccaatgattagcaaacgtgcagggatcggctggacaaccggtggtcatacaggtggagatgttgtgctgtacacgtatgctccgaacaatgaccgtccattcggtgtaatcgacaacacggatgtagcaaagtatatggcacgtgtactggatctggatctcgacagcgtgagcaaacaattgtttgtacctgccaaacaagcatttacggccaaaggcgcgacgtacaaactggacctgacggacgccaaaaatccgaagattctcgttacaaaaggtaacaccaaactggaactgcaaatctacaaaaatattgcactggtgaacggcaaaaagacaactttggagggtgtcattgtttataacggcgtagaggcatttgtaccacaaacggccgttgatctgattcaataattcgttagaactactgggactacaggagattacaccatttggctgccgaatatttcggcagctattttactgtttattattaaggagtaggttcctgctagcgcctatcgtataatgaacgtaacaaaaatacatatcatgcaaaacaaaaggagagattcacctatgttgatcaaattaaactggatcacgctgagggtcagtaatttggaagcttcgctcgggttctaccacaacatgctcggacttcccattcagcgcagattcgaaagccgtggacgacagattgccatgctgggcatggagaatgaagccaagctggaactgattgagggcagtgaatccattcttaaaccagaggccggcgtgtcgatcggctatgaggtgaactcgctggatgaagccatggaacgattggcagagctgaatattccgattgtgcgtggccccatccagcccaatccgcatctgcggtttatttacattacagatccagacggcttcgaggtacaactcgcagagcatgtctaattaggcgagtgtgaaatgagtgtgcgtatcactatgaccagcttggtgtgcatgtgtgaagctaaaactgcatacatgcacacactaactcaaaatggtgtggtatcggtaagcattatgtctgtttacagcttcatgcggcgcatcagcggcacacctatgcgattcaacaaccgatcaagcagcagccaacaccagcgtctgccccacgaaaggtggcgctcatacacagcggaatattcaaaatccgccacagcaccgcgattgcgtttgaactgcgcagccccggcgctctcatgtaacagatgcccgttttcgcgagcctgtccgatcagacaagctgataacatgcggtatagtccgacggattggggcaccgctgtgtcgtaaccaaacaacggcgttgtcatgattccatttcggcagaaataacccatcaccgcgtccaggcacccttccttccgcagtccatagagtctgagtgttcctgatgccaacgcagcagcaatgaaccgctcagtgaattgcggattgtgataggagtacttttcaaggtataacagcttgtacaattccacaattcgcggaatatctgcatccgtcatatctaattcggaaacgaattcgtatccatgcttgcccaataattcgtaatcccgcttcaacagccaacgtgacttcgagttgccaaaattcggatcatgcgcatggtacaggtagatttgtcggctcggaattagtcgacaccccacttccgttagcctcaccgtcagatcgggatgaagtccagggcacaaagagcgaaacacaatgacatgttcagggtatcgctcttgtaccgctgtaagcaaacattctgcttgttcaccggacatggctggatacagattggtggacaacaaccagttgttcacatgcacaactttgttgatttgcgattgcttcattccccaacctattagactgagcagcacagaaagacctttttccaacacaggcttctgcaacatggtcaattcttgcttggcgtaactcacataatgcgtatatggcgaacaaacgtaagcattatcatactctgtatcattcaccgtcagcggaataacgagatcatcaattcgggcgagcaacaatgtcgtttccacgttggacataaagctttgggtcccgtctagcatcataggttccagatagactctggcatatctgccatcctccgtatcgggccagtccatgtcattgaacgattgctgatcataaaaacgtacgcgtgcagccctattatcattcctaacctcatatgtactgtcatcacagtccaatctatctttcattcctttatccttcaaccttctactcccccatgaggttacatcttcttttaactaccatttacagtttcagttctacgctcttcatactctacacatcactgtataggaaaaaaatgtcggcatcaagctgtattccagatgaaaaaagcccgtatagtacgctaaatacgtaccgacaggccctcaactattaatattaaagtttattcgcaacggaagaagcctgatgatccgagactaactcattcaggtctacaatcagttgctccaattctccaaagctctctaccatcttctgtgtcaggttacgttgttcttccatgctcgccagaatctcttctgtcgctgcactggattgctccgttacactcgaaatctcggaaacttcattcacaactctggtggaagattccttcattgtagccgaactagtctcgatatctgtcgcttgattcaacacatgctgagagttgctgttgatcgtacggaatacttcctctgctgtatggacgctatctcttccttgttgtaaagatagacgaatacgttcgaatcgatctgtcagtgcctgcgtctgtccttttaatcgagacaggatggttccgatatcacttgcggactgacctgagttctctgccaacttgcgaacttcctctgatacaacagcaaacccacgtccatgctcacccgcacgagcggcttcaatggctgcattaagcgcgagcaggttggtctgactcgcaatatccgctatgctgttcagcataagcgtcatggattcactttcctcgttgaactttcgcatgtcatttgcagttgtattgatcgtttcatatagatcttgcatctggatgtttagctggtccatctgtgtgcttccagtttgcgtgctcgttgccatacttgcggacaactctttcatctgctgcgaatacgaagcaacgtccttgatatgctgatccgatacagataaggattccgagatctcggccacactggtcgcctggaactcaacaccttttgcaacctcactgaacccaagcgtcacctcattggtgatagaaccagtcgcatttactttttgcttcaattgatctgtataacgtgatagaccttcgaccgattccttcacacgctccagcatggtttccactctttgcttagaatgctccacctcattctggcgtacttcactttcatggaagagcctttgattcagctgggagaccagcatcagaatggcccccgtgagagcgaatagtcccacattaacgatattgcctattagctcaacagaatcaacggtcttcataacaaataattgaagaacactgttgactagtaataccgaaaatccaaccacaaaaaatttcttgttaggaaataacagtagaactgcggttataaccaaacttaaggcaaaattgaccgttccccaaccgacatagactccacatattgtaagtaatacagtaatcagccatggaatgagataaatatgtttctttttcgcattagcgtatgtaatccaaactacaaagactagagctactccattggacacaagtaacttcggcatcgtaaaggccagccccataccaatggcaataataatccacaaaatgataccgattaatttgttccttttccaaataatttcgtccatacgatccatgcataccccgtccttttatgtaggttaaatgtaagttgtagggcctttctgtactacatctagtagtctttggtcctgcttatgtgcaaatcgcaaatacgcagcgccttagcatagtacatattaacttcataagtatgaaaccagcgctactttatgtatatcggtattcaacatttaaaatgaatatgaaatgtaaaatgatatgtaagcatatcattttacaaacaaaaaaaggtctgtctcatgcgttatggcgcacaagacaggccttttgggtcgtgaaaggatgtgcaacagctcttactttccaaatacaagtgttgtattggaggagcctgcatacttggtgacgaactcacgcgcgtagctggcactttctacctgataactgtaattggagcttggtctccagttcgttttaggagaagtcggactattaagcgctggtgtactgcccgtatccgtaaactcaccttttcctttgtcatccaggatgcctcccttttcagcgccggcaccaaagtagttgttttcggaataaattcgtgctttttcaccaattgtgatggcctgattaaagttgtttgcatagttgtttttgagatggaagtaaccatatcttaaaagtccaggaccacgtacatataaattttcaaaataattgttggacatcgtcacatgaggtactccattgtaactgctgttaccatcattcggatgaccgaggatgacgccatacttatggttcgcaaatttggaattgctaatcgtaatatagtcggcgcgatcgccaatatacagaagtttgtccagatcattaccgccagagctgtagctgtgaccagcaaacgtcacatgatcaatccagtaattggagcctgaagtgatatacatctggatatcatcattggcattaatattggaagcgtgttcaaaagtcagattctgaaaaatcacattgcttgagctgcttgtggatctgaaatgaatattcgttaatgtatgtttgccaaaggaacctacaagtgtcttgttcgctccgaattcaaccttttgcagcgtggaggaagaaatattctgttcaacgacgacaattttggctgtagagcccgccatatgtgttctcaggtcattgagattactaacgtaaactacctgaccgttcttgccacctgtcgtagctgacttggatacaccattttcattcttggcactgcctgcaaaaccagtcaacccgttcgtacctgtgttcggataactggccgcaccatatgtagacggggctgtggagacagttaacaacaatagagttacagcgagtaaaagcatcgaaaatttcttcaaaatttcaccatcctttataatattatcctcaaagacaactcgattatatcgtgtaactttggctgtgacaatacaaaaattgcaaaaagacaacaattatcatttttatgcaacagcagatcagatatagtgaaaaaacataaaaccaggccattcgttcacacaaaattgagccgctaattagcggctctattaacgagtactatgtgatccatcttggaactgatccacccttggatcagttcctaaagcctctgacaaaaacacatcgcttgcggataataatatgttacgacttctgatagctgcggcggaagaagccaggtgtaattcgttccagcttcttgaagatggctccataatagctggtcgattcgaagccgacttgacgagcaatatcctccatcccgcgctgcacattgtcgagcagcagttccttgctcttgttgactcttacctgattaacatagctaatgggacgaatacctgtcgtcttcttaaacaaatgacagaaatattctggtgtgacacagatcaatccagccagcgttggcaaagtgatctcttcagcataatgctgttcaatatagtccagaaccggttttaatcgctcatactgctgcccgaccgtatcgctgccctcaacagatacgcgttgaataatctctgtcaataaggtatagagaatggcggagcaggcgtaattgcttaatgtctgctcttgtggtgttaaggcagcttgcagcagctcccgcattcgggatagaaggtattcaggttgtgcaagtgtgtatacgcatgtgttgacaatgcccacggttttaaacaagtttgctgacccgttgccatcgaaaatgatccagtcgacttcccaactgtcggatagcgcatagtattcgtgcttctgtccagggaataacagcatgcccatacctggcttgacgatatgttccgtttcacttagcttgagcttacccactccgctgcggcattgtatccactgataatcctcaatgccttggtctcggcggatatgctcctgttcatgatgcaggccgatgccaagtaaataaaaagggagcagcttgtctcgggcagataacaccggaaaattacgattgggatgaggcatacgactaactctcctgatcttaatattgttatatcatattaattatttaagatattcactcgaattaatataacatataatcgcaatatattgataaataaaggagatcacaggatgacaattaagatcggaattgattattatccagagcaatggaccccggagttatgggagaaagatgccatacttatgcaacagacaggggttgcagttgttcgaatggcggagttcgcctggagccgaatggaaccgactgagggtaattatcagtttgaatggctggatgcggctatagaagtattcgcttcgcgtggtatggaaattgtgttatgcacccccaccaataccccgccaaactggatgactacccgttatccggatgtgctgcccatggatgaacaacgccacatcattcggccaggagtgcgtggacatcgttgcaacaacagcccttccttgagaatgctgggctccaaatttgtggaagcgatatcacagcgctatggtaagcatcccgccgtcataggctggcaaatcgataacgagatgcactaccaggaatgccattgtgatacatgtaatcgttcatttgtcgcttggctgcaaaagcgttattccaatctggaggagttgaaccgggagtggggaacggtcgtctggagtggtgagtacagcagctgggctgaggtaacaacaccactcggtgccagcaaaccgatgaatccttcttatcttctggagtacaagcggttttgttctgacagcgtaggctatctgctgggatggcagcttgagattttacgccgtaactgtccagatcaattcgtgacgcataacatgtggcaatatccgaatagcctggactattatgatatgcacaacgaattggacttcgtctctgttgattattatccgaatgagctgtatcgcgattatggcgatcggtttccgaggaacggagcgcttacgctggacttggttcgcggcatcaaacgccggaatttctgggtaatggaacagctcagcggagcgcagggcgcctggatgccgattcagcgcaccccgtatcctggactgatccgagctcgctcctggcagacaatcgcccgcggtgcggatatggtcgtccatttccgctggcggagtgcaaccgtcggagcggaacagttctggcatgggctgatcgaccacagcaatgttcctggacgcaggttcagggagtttgcagagcttactcgcgaggtgaaccggttaggagaaatgctcgccgactcaaccattgttactcaggttgcgattctgcattcgcatgatcagcatacggcgctttcccttcagccgcaggcggaagggggaatgcactatatagacaacttgtcctctatgcataatgcatttctgaaaatgggcgtgggtacagacgttatcaactggactgaggagctcgatgggtacaagctggtcattgtcccttccctcttcctgttaagtgaagaagtagcacagcggctggagcgattcgcagccaagggtggtacggttgtccttaccaatcggactggcgtgaagaacatgaggaatgtatgtgagatgctgcctcttccggggctactgggtgaagcggcgggtgttgtcgtaagtgaatatgatgccatcggcaacagtgagcatcggatacggaacgcggagggcaagactttcgctgcgaagcaatggtgtgatctactggaactgcgaggtgcagagccgatcgcctggtatgacaacgacttttacgagggtgtaccagcggttactgtcaataagtttggtgaaggtgaagtgtattatgtcggcacttggccggagccatcgtatttctatcagttgtttgaaggcctattgaaggaaaaggatttggcgcccaaaatccagctgccggaaggtgtcgagctgtcgattcgaacgaagggggagcaaaacttcctatttctgatcaatttgacgaatgagcaacgagagattacgctggacgttccttatcgcagcttgttgaccagcgagaggttggatcagaagttgacccttccagctctgggagtagatattttaactgtataagatcagccgttttcatatttaaaaagggatgtctcacaaggcttacgaccttgatggacatcccttctctgctttcactaacatccacctaatctgaataagagtattgccagttagttcatcttatttgattttgatttccagttcatctttcttggcttcctgcaaatcatcatagaccttatctggtttaccactaagttttaataccatggactctggatggtccaacagattgctactgaaagaatacatcattccatcttccgatccgcttccacctaccatggataacttggtctgcttcccattacgggaggtcgaaatgatctcgataggccgaacaatctcgttgagcgacaacttcgttttgtaatcaatttcttgatcaggtgcatggacaaatttgacccgagttaccaacggagacacctccacctccgacaaaaagacctcataccctccaagagtaaaagtccgattaacgttaatgacttccgttttggggatagaaaacttgggatccagagggaaagaaacattcatttttttggaaaattgatattttcgttctttctcccccttgtctgtataatcccccacatctggcacaactgaagacagctggaattgtagattcacttgatcaggcaatggtttatttcgatttcgatcaattgtacttcgaccatacactatatgcttatccttcgaaaaatacacaccgcctgagcttccgttgtcaagcaaatcgcctgtcaatgcatccgtcatcttcatattgacagtcgaatacatctcctgcgaagcatccgttttggcagtatacaataccgttattctattctcatctgccataactgcattcacagtaaacgcatatatgcccgatgtaaccgtctgatctacaagttgcacatacccattattaattgctgatgttatcgtggttttttccacatcggttgccaactcacgaaagggttcaagtactccccaatgggtcacaggctcagtatatgttgcctgctcttgaccataactcccaagcggacctaagagaaaccaacccgcagccagaaccgtgaccagcactgccgtgatccatttgacacgaaaggtcctacctgatctttttgttctggccatcgcgagaccacgttgaattgcaacagtcgtatccgccggattccattgctgtttctctcttttcacctgatatgcatctgcaagaagtgctttctcctccgggttagtggtcatgccaatccctcctattcctcatcaacttgcgcaacttctggagccccttgtgctgccaggtcttgatcgtcccttccggtttgccgaggatggaggcaatatccgtcagtgtcatgtcgttataatatttcagcaataatacatggcgatatttcggtttcaccttttgcaaaagagattccatagcgattcgattatcgtcaacgctaattatccatgatgccggaatactgtcctccatatcctccttcgccagaggtgttgcccgcttgcggcgcctctgttcatcgatgcagacatagatcagaatccgaatgatccaagacttgaacgccttctcattgttcagcgtacgacgtttgatccaagctcggcacgtcatctcctgtaccgcttccagcgcatcttgctggttacgcaggtaactgtaggcaatggacatgagcgtatcttgatgttccataatggattgcacaaatgccgtctcgtcttcggtctgcacatagatcctctggttcatctctgcttttgtttccaccccgcatccctccttctctctctttctgtggtataagacgggtgagtgaagcaaacggtttttaatatttgttcatcaaaaaagctccgccatcattatgagggagcttgattacatagcacttcggctgccggtatactgaattacgtacacgaatgaacaatccaagatcaactaacttacaggttgccggtgacttcgatcccgtcagccaattgcagatggtttttcacccaagctgtaaactgattcaaaaagttccgtaattcaggctctgcaaccacctgttgatccagctctgataaaatccccacccacacatccttcgtaatcggattctcccagcaggaatcaagagccttcatctcttctccagttcgcgggtcagttaagggaaatgcgcgatccaatgcgggacgaatatagtcaaagtcttcattatatatgaacagcatgtcttccatctctacttcaaccgattcttgtatgtataaaggggataaaacaaaacccacattccgctgtggaccttgatactgatacatgagcgcaggaattgttctctttgattttttagccatatgctcctcctgtttcaggcaaatcttctacccatcagagttcaaaccagattaaaccaccatcaacccgcctggtttcttgctccatctgatgcatccagctccgcgcctcttcaccccagatatgaaacaaacagtagatatacgaatccccatccacaatctcttctaacccggaagctttttctatccacacttcaagggctctaggccaggaaggatcttcacgtttcaatacaaagccgttggcttggtgttccaaactatacacttcggtaaattttaatgaacttgccaaacgcttcacaacttcaggtaaaatcgcaggctccgttgctctaatcccatattcccagcccatatgtacaacctccttcagacttcgttcgctccagattgttgcttttgttcatgcatttgatggattgaacgatccaaccacaactcataccagtccagaaaatgtaatcgattcgtattgccccaatactgatcaggatagattccattgcggttagcccggtcatcaacccagatctctccgtaggaggcccccttaacaaccagattcatggagacgccacaaccaaaatcactgatgcgcagcatgcctgccgaccattttggatcaaaatattcatgttccagcacttcccattcctcttcttccttgctatcatcgaaccagtcatagttccagttccatgcttccgtgaattggaaagggtccgagatcgcattcagctcatcatcataaccaagcacagcgtatacgccatcattcgggttttccagaccataataaggtcctgcaccacccgttcccatatgaagaagccatatcttatagtcctccggcaactcaattcgccatttctgttcaaattgcgcgatatccttctgcgtccacacagatgccatttcatatttatggttctctgcgccaaacaggtccagatcggggtcgagactccggagagtgatcaacttttcacgcatacgttccaattgcatcttgtacatggcttccccatctcccttagctactcttttacgtttgtcccacggcgtacccgcgttgctgtaactcatccagtacggctgccacatctcgctcaggacacaactgcttaatcaggctggcagtcaccggtttttcttcatatacttcagctattacttccaacggtagatcctccaagtcgtagtaccctttggcccagtcaacgtaatcttccgagttcttctctatatatccaagtaaaaattctgcaccacctctggcgtccgctttgtcttcctcggtcatcgccagctgaatccagttaccaaccttccatggcaagtcgtccccttcctgccataggcaaaaggtcacatcctccatatccaacgtttcctcatgatctcgcagtacagctatcaacgtctccggtacttcatcgtacatgcccgggtagatctcaccatcctcacgagcatgcgggcttaaaggtgactcatgatcgaatcccttgatcaacgtgcctgagttcgtaaacaagacatgcagatgatcacctgcgccgttattgatgtttccccatgccacacctggctgaagtttatcttcataatgatgaacgcgtagccattcttcctgcgaaaagatgatatccaaagcagcgagtattctcattcgtttacgcagggcatctgcattcatcatcgttatctcgttccaatcctgcatatcaatccctcctgttcgtatatgtacactatatccggattaattcatccagcgtgttatttccctgaatacttggtgtcatgacaatggtgatccgactggcttctctggagacgatacacgcataatttcccggctttaactgaaacagaaccccttcacacgtctcatccggctccaattcacccccagtgacatcatcagccgctcccagatagacgtgcccagacagaacttgcagatgatacaccttttcccgttccgctccgtgatctggatctgaatcctcctctacatcctccaggctccattccacctcatacactccatccgcacccagattcaagaacagacaatgacctgcattcacctcagccagctcatccactgaaatggaccaccagtccgaagtatcctcaagccgatgttttaacgctgccagatcatacaggcacaatgttgccgtatctgtaaccatttgaaatgtacctctcatattcatccgtcccttctgtctgatccaagtctgacctcagaaatatattccatcattatatcaagcctgatacacgtgtaaaaggaacccatggaccatctctgcttgcgcaactcttcatttctcgctccaaatggtcgatataagcataactgactttttttgaacctgatggaggaagccaagccatgtcaattaacaatagaaaagaaccctttcgctacacattgaaggaaccgatccactttgagatctatattctcagcatcaacggggttaacgcaccagccaaacccattcaggccgaactctgcgatatcagtcgatccggctgtcagctgtcatttccgctatcccttcctgtagagaataacgatattcggattggaatgaatatgctgctctttgaagaccctctatatatggaaggcactctccgttggggtcaagaaaaaaatacctcatggcactatggtgttcaactcgaaatgcaggatgggaaccaggaccgtctatctagagagatgcgaatgcttgcaggacaaggcaaaattatcgtgaaatagccatatagcctgataacaaaaaacaaaaaaaacagcccaatcaaattggactgtcgcaagtgaaactctttatgccgctttacttactgtcgctggttgttccattttcgaccagttcacggttttttcaagaaccagtgagaccaataccccaatgacgagaccattacttatgatcggaatgaggtacatgggcaaggtttgaaaggcctcagcaggaatattcatgactgcaactcccgtgaggaccggcagcgctacacgatagatcgttttagaattaaacgttgtaccttcaagcgttcttagtgccgtgccgaacatctgaagataagccacgaacaaaaccgcactgccgacgcttggtggtatttgtgcaaaaaatgctgtcactgaaggtgtaagacctatcacacacaacatgcccgctccaattatcaaggcagcacgacgcagaatgcgagtactctccaggaatccgatcgatgatgcaaataaaccaaagggcagcacacctacacaggctgacaacatcgtgaacagacccgttagtgcataggaatgcctatactgacggcttgttgtttctgtccggtatagtttctcaactgtgcttaatgtggtgatcgaattcgtcatatttaccagccccacgaaaaatgcagtaatgacaatacccggttcccatctgggtgttccccacggaaacagttcgagaccagccggggcctgattaggctgtccgctatgctgtccaggaaacaatagactataagcgatccagcctgccacaatcccaatcaggatcgcgtagttccccagtttccccctaccctttaattgaatccatgccaccaaaaatgcaatgacaacggataatgcggcaacaggcagatcgaaacgaccaaactccgtatatccaatcatacctttgaaaaaattcatggttaattgaatcgtcattaagaacaacatcgcactcttcaccataggtgtgaacagcttttgcagcacttgcgccgctcccagccaacccagaatcaccatcgttagtcccgctaatagaaaacctgcagccagcccaccgccaatacgctccagactcataccggccgatgaagcagataccgtcaaacttagcgtcaatccccaccataaccctgacggaccatccataatcgcatatcgatgaccaaatacggcttgaagaatgcacactgctccggtaaggataaatgcgtgctgcatggaggcagcgatggcatccggagacagatgaaaattatgtccaatggatagcggaacaacaacggtattggtaaacaggaagaaaaaccactgtatacctgccaaaatcagtgaagatacgtccttcatattcttttgtaaaaaatgctcttgatgtctgttcattcgtttggaatatcctttcactgttctgtatcataaatgtatagccttttcagacttgggttaatagtcgttccatctcggcataccgatgacggctcgcatgtgcaagcggtgtaatcccgtcccgatccgcgatctttggatctgcaccatattgcaaaagcaaggcaacaatctgctggtgacgcggcccaccatctcccaaaatgaccgcttccagcaaggctgtccaccccaggttgttgatatggttcacatccacatcactgcgtgtcagcagaagctccacaatgtccacatggccccgatccgctgctgggataagagctgtgccgccaaaacgattcgttaacctcgtatctgcacctgctgtaatcgccaattcgaccatgtcatacataccctcagcactcgcgtataacagcaggttgtccactcgtgcatcctgaagattaatgtccgctccggcgtccactaacatccttgccgtgtctatcttgttaccgtgcaccgcagccatcagaggtgtccgccccaatatatcccgttcgttcaaccggttaccctgttgtgtgataaatcgaatgacctcatcggtatggcccgcttgagcagcatcatgtattgttctaaccacgttgttttatcctccaattcaaggtctttctcatgcagtaatattcatatagaaaccaaaccctgttagtcaggtatgcaaatctaatgtatggtaacataagatcgtagtatattaaaaatacatgttttgttggctttccatacgaattacatatacattgcaggcgaaggagaacaaccacttggatatcaaacaatgtcgctatttcattgccattgctgaggagaaacagattacagccgcagctcgaagacttcacatggctcagccccccttaagccagcagcttaagttaatggaagaagaacttggtgtgattctatttgaacgcaaagggcgtatgatggaactaacgcaggcgggtcgcagcttctatgattatgcagttaccttgaccaaatatatggaggaagctgtaatggagatgcaaagtttccgtcacggcatacggggcaaactcgccatcggcatcaataccatatcggatcgcctgatcccgcaagcactgcaacagtttcgcaccacccatccacaggtcacctataaaattcagcaaaatgagtctgcacaattatgccgattgctggaagatggcaaagttgaacttgcctgtgtacgcatgcctgtccagactgaacgttatgaggtgctgcatctgccacaggagccccttttctatatttcttcaacaccgcttgatagtccgacagagatgggagcaggagtggagatggggacttattttgagcagcttacaggtatccccctactgcttccaagtacagagggactcggcatgttcgagttgattctggacaagttccgggagcatcaggttaccccctccatcatgggtgagtgctcagacattaatatgttgctcgagctggtccgactcggcttcgccagttccatcgtgcctcacacggtactacagctatatcacgagcacccatttcacgtatatcgcattcaggaccagcattccacggttggctcggcgctggtctggttgcagaaccgttatctgtccaagcctgcacaacattttgtgcaattggttcaagggatgcttcccgtgtaaaaggctataaacaaaaaaaacagcagctttaccggattacattccggtgaagctgctgtttcatttttatggttaagctttagctgtgaacaacaagtctttttctttgatcgtagtgcgaccagcagactcaatggactcatactgatgcatgtttgtaataatgactggtgtaatcgttgtgtaaccggctttttcgatctgttcccggtcaaactccatcagtacatcacctacagatacctttgcacctgcttgaactttaggagagaagaactgacctttcaacttcacggtatcaatcccgatatgaatcaacatttctgcgcctgtatcacttaccagaccaatggcatgtccactcttcgataacgagaacacggttccgttgatcggagatacgacgcgaccttcagatggttgaatcgcgaatcctttacccataatctcttcagagaacgcagggtctggcacttcgctcagcggtttaacttcacctgtgattgggctgaatacttgttcatcttgtgcttttgcttcttcagttacagtagcagaagttactgctggtgttgccggctcagctgctggtgcagctactggctccgatgcattttcttcttggaacccaagaatgtacgtcagtactgccgcagctacgatggcaatcaaaccaccagccagagcatagagcagtgtgctaattgctggactgataaatgctgccacactcggcagacctgcaagtcctgtaataacgtacgatttaacattgaagatacccatgaacccaccggcaatcgctcccccgataagggctgcgataaatggttttttgaacttcatgttgataccatacatcgctggttccgtgatccccataatagccgtaagacctgtggaataggccagggatttggttttgctatttctcgatctgagacctacaccaaatgctgcaccaccttgtgccaagttagctgcaaacatcagtggaataataaagtcgtaacccagtgttgtcattgaaccaacaacgattggcagcaacgcatagtgcatacctgtaatgatcagcagtgacatcgtaccaccaatcaggatacttgcgaagatggacatgttgtcgaacaaccatgaaataccaccggacaaaccattaccaagaaccgtacccaatggacctactgtcatcaacgtcagtggaaccataattaacagtgttactgttggaacaaccaagagtttaagtgaagcatgtgttacacgatcaacggctttctctacataagaagcaatccagatggcgagaatgatcggaattactgtggaggaatacgttgcggcaatgactttaatgcctgcgaatgtcgaatccccttctgcaagtaacgcggtaatcgttggatgcataatacccgcggcgagtgctgccccaatgtacatattgctacccagtttacgtgcagcactgatcgccagaatgattggcaggaagtagaatgcaccgtcaccgattgctgacaaaatgatgtaggtcgagctggtatcggacaaccatcccagtgctaccaggatagccacgatccctttgatcataccagcacctgtaatcgctggcagaatcggcgtaaatatacctgaaatgaaatcgaataacgcacttatcggatttctctttttcttttctccagttgaagcgcttgaggttgcattatctgcgtttggtgatttggacatgttgccaacgagtgcgttatacacgataggcacatcgttaccgatgataacctggaactgtccaccgttctccataacgcccataacgcctggtgtattttttagcgtcgctttgtccgctttttggttgtcattcaggttaaatctgagtcttgtcatacagtgtgtgacttgatcgatattctcttcgccaccaacaagcttcaaaatatccttggacaattgttgtttatccattgtgttttgctccttttatgtgtaatgaaggttaaaaaaaaacctaaacactgaataatgacaaagcagaaaagcttatcattattcaacgtttaggttttgcctttttagcagtaacaatcccaactttattcaattgtttgttcatttctgacaattcgttcaatatgaatggtcagatacagtatttcttccttggacaacacccgattatagatcttacgcgtatagtcactgatccttactgcacatgcatgtgcttccggatactgcttgctcaccaagtcatgaagcggattatctacttctttatcttcaatcgccgttccttgcaacacacgttgggcaaagaacttcagatgagttaaaaatcgataataactcaatgaatcttcatcaagttcaatcacaaagctacgtcttacgatgttaagtatgtccttaacgatgttcgtaatactgatcgtttccctcatctcaccgttcatctgggcattaaccagatgcattgcaatgaatgcgcattcgtcttcgggtagcaggacacctaatgtttcctcaataatctgtagcgccttgagtccaatggcatattccttccggtacatgcgcttgatctcccagaacaatgcgttacggatctgcaatccttgacgatgtcgatcaatggcaaaatgaatatgatccgtcagtgaaatgtagatgctttcatgcagcttctcacctaacaccgtctcggcataacggataatctcatccgagcactcgacatattcaaccgggatatcagacagaagtgttttaagtttctgtgatacttccttactttcaagcgagaatattttttcgacgagactctcgtcaatcgattcaccagtatgctttttgaaggcaattccacgtcccataacgaccagttcgtttcctcccggatcaattacggtaactacgttgttgttcagcaccttctcaattttcatttcttcacatcaccttgcaccgtcaaagtagtaaaaggcaaaaccaaagcaggtcacgaaatatgccccgcttctggttttgcctgattgaacagtaacaatccagtattcattagccttaggcccatcttaccatataattatccatatgacaatgtttttgtgaaagcggttaatgtgcgttaatgtgacatcagaaggtgcttgcacaactatgcttatagaactagtatttactcgttgttgttcttaagacttgcgccatttgtactaataacttccttgtaccaatggaatgattttttcttgtaacgatccaatgttcctgaaccgtcattgttgcggtcaacatagatgaaaccataacgtttcttcatctctgctgttgaagcacttaccaggtcaatacagccccatgacgtataacccatcacttctacgccatcctcaagagcttcgcccacctgtaccagatggtcattcaagtattgaatacggtaatcatcgttcaccgttttattgccattttcgtccgtaatcagctcatcgactgcgcccagaccattttcgacaataaacaatggtttttgataacggtcccagtatttgttcaaggttacgcgcagtccttgcggatcgatctgccagccccactcactcgctttcagataagggttttgcacacctgcgaacaggtttcctttgccttcgatacgtttctcgggatcaccagtctcacagatacttacataataactgaacgagataaagtctacggtatgcttcagaatttcagcatcgccatcttcaaacttaatattgatattattcgctttgaaataacgattaatgtatttcggataataaccacgtgcatggatatcagcaaagatatcattgcgctgttccgcatgcatcgctgcaaccacatcatccgggtttggagtcaacggatacgtaggcatgctcagtaccatacagccgattttggcttcaggcataatttcatgacccagtttcacagctaacgcactggctaccaattcatgatggatcgcttggtacagatcctgtttggacagttcagcttttggcgtatagatgccgccactcatgaatggttcctccaggatggagttgatttcattgaatgtcagccagtatttaactttgcctttgaaacggttgaacagcactgttacataacgctcgtagaaatcgatcattttacggttaacccagccatcatacgttttggacagatgcaacggtgtctcatagtgagagatcgttacgagtggttcaatcccgtatttgtgacactcatcgaacaggtcatcatagaattggagacctttctcatttggttccaattcatcacctttagggaagatacgggaccaagcgatggatgtacggaacactttgaagcccatttcagcaaacagtttaacatcctctttgtagcggttgtagaaatcgataccgatcagtttcaggttatcttctgtaggtgcttccgttctaggcgttgtaatcccgtgtggcattacatcttgaacagaaagacctttaccatctgtattataagctccttcaagttggttggctgctacagcgccgccccataggaagtctttcggaaatggtgtagtcatatcaatcattcctctcattatttatcattattaagttggttattgaacttagtttgttggcaattgttccaatcgttgcagaatcagctccagctgagcacctgtaaccgacttcgatgaatcaaattgatctttggacataccggacataataccggctttggcactattttgaacggcttcataagcccaatgcttatcattcaaatccttgaacaatactacagttgactcgtctgcatcattccagccgcgactcgtcaaaatatggtctacgatcactgccatctgtgcacgtgttacttcctctcccgaggcaaatatctgattgctgacacctttcatcaatcctgccttggtcactgttgcaatggcctgacgagcccattcaggagcagaatctgtgtacgggtaagcagattcggatacttcaggaagatttaacttgtcggcaagcacgagggcgatctgcgctcttgtcacaggctcagttggttttgttccatgctctatgttacctccatcctgttcccctgaagtccctttgcttagttggaacaggtcggcaagtacttctttgttgtcaaaagccggtacccatgaccaatgcttcatgccaccgtacagtctttggctatccatgtatgcatcgtcatacagcgtcatattgacatgcttggctccaagctcagtcaaagcctgataagccaaagagcttgtccggctgtcagtggttggatcatttttggcatgcataatccatactgggacatccacaatatctttcagttcttttttgaatgcttctacagatccggtgtaatccgctaccgtatccttggccgctacaataatcgctccagcaaacagatcgggatattgtgtcaagaaacggaaggcaccaccaccgccactggaaacaccagacagatagatccgattcggatcaacttcaccttcagcaaccagcttctgaatcaactcatactgcgccacgaagtacgcctgcatctgggccagttgctccgggttatcatagattttgaagctgtaattctcaggatactgtacggccagtacggaagtatcataccccgattccgtccagactactgctccacgattagccgtaagatgacttctaccatccgtacctacttctcccccgccatgaagccatacgacaagcggttgtgcgttggtggaaggactacgcttcagacggtaagacaacgcttcaccgttgctgcccgtgtacgtacctttttcaaaatcatcgacggttcgggtaacaaccttatccacattggtctcatcaaaagatagctctggatacgttttgttcgttaccttaaattttgaaatcatacctccaggatatttaaacggctttaccgccatatggatggtatgatccgtaattgtcaattttattccgtcatcttcatactcattttgtatgatctcttccgcttcatttaaaggatagccatcataattgccagtaatttcgaagtctgaagctttcagattctgatatttctccggatttgctacagtaatgtcaaaggactctaccatctctccaggatcaccaacataggtattggcctggattggagtaacctgggtgctttccgcaccaacggttgctggccagatcacactcagacttaatgtcagggcaagcatccatccgatactttttgtgttcatactccatcttttcaaaagatatccctccatatgtaatgtttgcagcacataaaaaaagcggacaaacgctaatcagcaggccctcaggaacattaaattccattaaacactaactgttatatcaggtttgcccgctcagaaaacgtgagaactacagttgctcaccattactggagattacgtttttgtaccagtcgaatgaatcctttttggaacgtttgagtgttccgttaccttcgtcatccagatccacgtagatgaaaccataacgtttggacatttcggaagtggacatgctcacaaggtcaatcgggccccatgctgtaaatccaatcagatcgacgccatctttgatggcttctttcatttgttcaatgtgttttttcaggtaatccacacgataggagtcatggatcgaaccgtcttcttcaacacggtcatatgcacccagaccattttctacgatgaacaatggtttctggtaacgatcccagaagttgttcaaggttacgcgcagaccgatcggatcgatctcccagccccagtcggatgcttccagataagggtttttcacgccgccagtcaggttacccgatgtttcttccttgtctgcagatgcagatttggttacggacatatagtagctgaaggagatgaaatcaacggtattgttcagcaagatctcgtcatcgcctgcttctttttggatcacgatgtcgttttcttcaaaataacgagccatgtagttcgggtatttaccacgagcatgcatgtccgtgaagaagaggttaatctgattctcgtgttgagccagacgaacatctaccggattacatgttgctgcataagtctccatacgagcaagcatacaacccacttgggaaccaggcataatctcgtgagcaagcttcgttaccaatgcacttgctacaaattggtgatgcagcgcttgataagtggtttgcagtttgttgtccactttatcgatcagaatgccgccgccagtgtatgggctgaacagcattacgttaatttcattaaacgtcagccagtatttcactttatttttataacggttgaacaccgtttctgcataccgaacatagtgctggattacttcacggccagcccagccgttatatttttgcgtcaagccaagcggtgtctcatagtgagacaatgtaacgagcggctcgatgccatatttcaacaattcgtcaaatacttcatcatagaatttcaagcctgcttcattcggctcttgatcataaccgttcgggaaaatacgtgcccagtgaatggacaaacggaatactttgaagcccatttcagcgaacaatgcaatatcttctctaaagtgatggtagaaatcgataccaaaacgtttcgggaaacgttcttcaaatttgcctgagaggatctcttcgattcgggaagaggaaatttccatagcatgtccgcctgtacgcttctctttgggaacatgagcgatcatgtccgctgtggagaggcctttgccgtccttatcgaatgcaccctccaattgattggcagctgtagcgccgccccataggaagttttcggggaatcctttttttgccgtggtcatgaacaacaacctcttttcgaaatttattttggtttttccaggtaaaaaactgtaatttagagcagaaaacaagaaaaacctaaactcaaggtaaaatagcaccaaaaaaaggagctttcatttcaccatcagtttaggttttgcctgtcttcacagttacaatccatcaaaagatgttattgcatattctgttgtgtttgctcttgtaatgtaagcgtaacatatctattttgcaaaatcaacttcactggatcaactgatcgttcgcacactctcaccatcgaaaaaattaacgtggcatacgcataatggccgcccttaatgcctgcgctccttcctccgtttccaggtaaacagcgggactttggtcccctaaagccgggatatctttcgccatccattcaaaagcgtactcccccatttcacacaaaagcacccgacttatatctgccggaatcccttgtaatcgcgcatgttctacccacgcggggtccaacttttgtccaagttcttcaaacccttcggaaaatgagtcccagcttgtatgattaaactcctttaaatagatacctttcatactcatgtaatttcactccctgaattgcaattaataacacccaagtcctatctgacacaattcatccttaagccgcttgaatccgtttctgtaacaggtagacttaattttaaatgtttttcgggggaaagaacagtcaaggaggattcaataatgactcaggaagaaaacacatccggttgggatgcgattgatcaatccatgcgtgaattgtatggggaacaagagccaaaacactacggcactgcccttccatatattcttggaggtcccgatccactcgatggcattagcgtttatgaggtgaacacacctatgcctcactggcattttgttacctacggtttctcagaattatatgaaaaagagatgcatgatgcatccaaaagcgggtatggatttgaaatcacctttcgtcttacacgcagtgaagcagagactgatccgccagcctgggcgctgaatctgctacagaatgtaggacgttacgtgttcaacagcggaaatatctttcagccaggagattacatggacgccaatggccccatctgtctggaatccgatactttgctgacagctctctcgtttattgaagacccggatctacccgcgatctctacgcctaatggttcagtgcaatttattcagatggttggcattacaggtcgggaactggaaatgattcaaagctggaatgctcgtggattcctgtctgcctcctccatgttcatgcccaaatatgtgacggatctgatgagaaattcgtacgcagatatcccttcggttatacaagcggttgagcatggaatagaacaggacgggtccagcacagcgtttttattcatacaacaactggcttgggaatctcctcgcaaaaaattgctgcaaaaatcggttccggctaaactccagcttggagccaaacaagccgtattagttggcaccatccttcgtagccgaatttcgaaaggtgcctctctatccttgatcggaccggatactaatattctgttcgaagcaggagaacagccagccgtattggaatcagacagacaagttaccctgacggtgaacaaacaaattgttgatgagctggcagagaaccttcgcccgtttgaagggacatttgagataacttcattggatcatattatcgttcagattgttagaacagaaatcaaggaccaggaaggacacgtcattcaaacgattggatgagaactgtgcagcaaggaggaaacaacatgcctgccattacatttgcctcacgacacgaagagtctccgaattgctcgcatgcagcaggaacggctccgttcgactatttaccagaatccagtctggacaggcttcgtaaaatcaatcatttcctgattcatgcattccagaacagtatctcggttatccaagagaatttaacgggcacttatctttttttactcgcagatagcaacggtgtgctcctctcgatgaattacagttcagatcttaaagctgtagtagaacattcccccattcgtccgggcatgttcttcactgcacagagctgtggagttaacgccatatctgtaacgatggacagcaacgagcctgtagtgctgctgcccaagcagcatgaaagtccttattttcaaagctggcattgttacgccgcacctctgttcatgggatcccaacatgtcggttatctggatgtgtccaccattaatgcagatatgcaaggtgaactgattgccattgccaagctaattccagcgtacatgcagaactgttatcagagtcaacagactgctgaagcgtgcgacaaaccggcggtggagttcaccgagcgtcagttaaccattctggagatgatagccggaggcctcacggtaaaagccattgctttgaaattaaagatcaaggaatgcaccgtgaatcatcacaaaaaagtgatttttaacaaattaggtgtgcaatccagcacagaagctgtttcaattgccagccgaatgtcttatgtatagaagacccctatagattcctataggtagtatatgagaacgtttgtgctacaatttaagaagcaggcaacatgtagagagagaaacaaacacacacacatttcaggagggtaatatgacaattccaaaaaaagcttctttattcgccatgctcattatgattatgctggttgcagccgcttgcggtgacaaagcagataacacagccgaaacagaagagactaccccgacagaaacaacgactggtactgattctgatacagcgactacagaagaaacagagaacacagaaccagcaagcgaagagtccaaagaaactgataattcccaagacgttgagctggggactacggaaaaaggttcttacaccaatgactattttggcgtatctctgaaattcccggaagcatgggagttccaggatgctgcaggcatgaatgagctgacaagtgcttcatccgaagcgattgctggtgatgatgaaacgaagaaaaaacaaattgaactgtctcagaccaaaacattgaatctgcttatggcttcaaagtacccattggacggcggtcaagttggcccttccgctatggccattgctgagaaagtaagcttgttgcaaggcattcgtacaggtaaagactacctggaagcaaccaaaaaattcatggtggatagccagttcccttacgattataaggaaatgacaacggaaaccatcggtggtaaagagatggatctgatgcaaatcacgatggatccaggtgacggttcaaccgttactcaagattactatagtacaattattgaaggatatgctttcaacttcatattcacttacgtggatgataagaccaaagccgagattgataccatcaagaaatcggttcaattcaaataatcgcttttgattactgcccttatacgaagcacatataacacaaccccgataacgatctatggagatcattgtcggggttcttttttcgttgaaaaagactatatgttgcactatctaactagatatggctacccagtgcccttccgtgacttctacccacttggaatgtttgagattataacggtcctctacttcaacattctctcttgttgtttctttcacaacatgtctctttttcttcgcttctaccgccggatcaggcacgggaatagcagatagcaaagccttggtgtaggcatgttgcgggttggaatagagttcttcactctcggccagctccacaattttcccattatacatcacagccactcggtcactgatatgtttaaccatggacaagtcatgcgcgatgaagagatacgtcaatccgagtcgctgctgcaactcttcaagcaattgtacgatttgagcctgtatcgacacatccagtgcagacaacggctcatcacatacgatgaattcaggttccacagccagagctcgtgcaataccgatccgctgtctctgtccacccgagaattcatgtggataacgctgcgcatgggtaggatcaagacccaccatctccagtagttcctctacccgcttctcccgctgagatgctgtacctgcaagttgatgaatatcaagggcttctccaatgatatccataatcctcattttgggattcagagatgcataagggtcctggaaaataatctgcatatgtctgcgcatcgttttcatctcagaagctgacaagcgattgagcggaactcctttaaacagtacatctccacctgttggctcatgcaaccgcagaatggctcgccccgtggttgattttccgctaccggattcccctacaacgccaagcgtctctccttgacgaatatgaaaactgatatcattaacagcctttaaggtattgcctttccccagattaaaatgttgtctgagtgatttcacctcaagcaatggctgatcatcctccagatctctcgggaccaacgataccggtttgggctttttcttctgatccagacgtggtaatgcattcagaagtctaatcgtatacgggtgtttgggattagcaaaaatctctgttgttgtcccggtttccacaatctgtccttctttcataacaactacccgatcacacatgcctgctactacgcccaaatcatgcgtgatcaggataatcgatgtgcccagttggtcctgcatatctttcatcaaattaagaatttgtgcctgaatcgtaacgtcaagtgcggttgtcggctcatcggcaatgagcaattcaggacgacaagcaagtgcaataccgatcatgacccgctgacgcatgcctccggagaattcgtgtggatattggttgtagcgtatttcactacgagttatccccacccgctccatcatggcaattgcctgtttcttggcttcccttttggacaccttctgatgtttgatcaaactttcggagatctgtttccctactttaatggtcggattaagagaactcatcgggtcctgaaagatcataccaatatcacgcccacggatgctctccatctctttctgcgttttattcgccagatcgacccctttgaacagaatctctccatttttcatctgtgaaggcggcgatgcaagcagcctcataatggaacgtgctgttacactttttccgctgcccgattcgcctacaatgcccagcgtctcgcctttgcgcacttcaaaactcactcctcgcactgcctgaaactcactctctccagaatgaaaagagaccgatagatcattaactttcaataaaggttccatatcatcaccagctctcatccgtttttcccatttactcatctcatatgtataccatttaattccttgacaattgtttagaccctaaataatatatactatatcaatcggaataatgcaatttaaacctgaatgaaaggaggcacgcttggtttgaatcttgcagaaggcagcagactcacgcggttggtgcacaatttaagttttatttatggcaaaatgctgcttcatccttcctaccgatatgttctgttcattcttggattaccgatcaatctggtcgtgtttctaatatggcgttcgaatcgaaaaaatgacggctgggtagccgccaggcagacggctgagcaagaactgctcgcttcttcctatcggaacaagatgaagttggaagtcgaagaacagctacaacgcaaacatcgttttttccagcagcaggtcagtgaggaagaattcagacgtcagaccgaggaatggttggaagaaacggttcagaaagagttgaaggagcggacttctcgcatacttcaggaacagggaagtcaacgtcttacgatggccgatacattccacacccttatcgacaaaccgtggtttttcgcgatatccattattcctggctgtctgatgtatggcatcctctttttgtatggaaatccttatctaaagtacatatttgaaagaatactgatgacggtatttgtcattctgggcgtagccacactcgtatttacgattttgtatatgtctccgttcaacccggcagctaacattctcggagagacagcaacgcaggaacagattgcagcattcaatcaggtgtatggcttggatcagccttatctcacacagctctggaacaatattaagggagttgctctcttcgatcttggcaagtcttttgcaggaaatgaagacgtaacagcaacgattgcaagaaagtttccaattacattgacgctggcggtcatctccctgctattagcacttgtcattgcattacccatcggtatcatctcagcgattaagcctaattcatggttcgattatacgtttatgttcatcgctctgattggattatcgatcccgaatttctggcaaggacttatttttattctgaacttttcgatcaaattgcagtggcttcccgccaccttcaacccgcaaaattggctgtcgatcattatgccaaccattgtgctgggcacaggacttacggctgcggtggcacggatgacccggtcttctacactggaagtcattcatgaggattatgtgatgactgcccgtgccaaggggttaagcgaacgtcaggtcatgctgaaacacgctgtacgcaatgcattgattccaatcgttactgtggttggacttcaattcggagccatgctcggcggggcagcagtgacggagaaagtgtttaatatcagcggtctcggcagctatattgtggataaacaattcatccccgatattccgagtatcatgggcggagtaatctacacagcaattacgatctccattatcaatgtagcggttgatctgctgtacgcttttattgatccaagagtgcgctccaagatgaaacaatattaaagtgtgtgttgaactacctcttaaagcaggtgtattatgacaaactcgtccttaacacaagaaatgcgtttccggcttaagtcttctcgagaatacagtcaggcaagcttcgcctggatcacgtcccttctcttgactgccttgttgctgttcaacagttatgactggagcgggcagacgttcaaaccatttctgctaacgatacttgggatctatgtattcttcacactggtccaaagtgtcatcacccttcggattcgaaaagacttgatccgtacaggtacgatctctactttgacccgcaggttagcctgggttcagctacttgccatcatttctggcaacatatttatcgtaacggcagcctttcatctgattcgaaaagccaggaatgtggagtacacctttgcggtatatatgctgttaacccagctgttcgtcatcggtgtatctgcgttaaatgttttcaaaccctatgtggctgacaactttctgccagctatggcggtgctcatatttattctggtcatcgacctggtcgtactgattatcgtatcccgatataacgcgacctctatcctccctcgctggatgatcggtgtcagtgtagtactgattctgacctcaatcacaggtaatgtatttgccctattgctcggcatttccattattgggcgcattcgcagacaggggaaacaaaaatcaaacttctggaatgatctgtgggagcgacttgctccgaatatgactgccatgtccggtttgttttttatcatttttctgttctcgatatcgatttgcagcttctttacttttgattacagcatggctgtggaaaacaactactccgctctgcttcaacccccttcccttgcgtatcccttgggaacggacgacttcggacgatgtttattttcccggattgtatttggtgcccggatctccttaatcgtaggttgcatgtcgaccatcattcctgtgttgatcggtggagtcctcggagcattctccggtttctacggaaggcatacggataacatcatcatgcggctgctggatattctctatgcgattccgggaattctgctcgccattgccattattgcggcgtttggagccaatacggtcaatcttattctggctctgagtctgggttcgatcccaacttacgcccgtaccatgagagccagtgtgctctatgtatctacttttgaatttgtggaagctgcacgtgcactggggtacaacaatcgtacgattattttcaaacacattattcccaactcccttgcgcccatgattatcaagtccacactcacgattggtggagcggttatcgctaccagcagtttgagttatctgggactcggcgtggagccgcatattccggaatggggtaatattctgaagctcggcagtacatacctggagacccactcttatctggcgatttatccaggcttggctattattctgctggttctttcgtttaactttctcggtgacggtctgcgtgatgcgcttgatcccaagctggaaaaggcataactgattcgtcgttgaaatgaatgatatagaaaaaagaaaccacacatcacacattcaagatatggagggtaatcccatgaaaaaacgtacactgatctcattactattaattctcgtcattgtgatttccggctgcagtgtaaaaacgaaaactgaatcccaggcggagaccgcaccagcggacacaactgaaactgcacaaaaaccggcagacattgaactgctcgccatgagttcttccgaaaatgatgtaaacattgtccgcgaccaactgactaaaaacggcttcaatgtgaagctgaacctgcagccggattacggtagcttcaaatcccagcaagatgcagggaattatgacattgccttgtccagctggacaacggtaacgggaaatcccgattatgcggtgcgttcccttttcaaaacaggtggagattacagtatccttgccgatggggaacttgataagctcatcgatcaggcagctactcaaactccggatgagtacaaagacacgtacaaacaattggaagatcgcttggtaacggatcaggcgtatatcgctcctttgtacatttccctgaaaagtcaggctgtgaaccaagacattctgaatgtcgacaccgttcgtctctccaaatcccgcgccatggcttgggaaccgatcgagttcaaggacagctccaaaaatgccaaagatccgttgattctgacgcaaagtgcatccgtactgacttcccttgatccgatcaaaggaaacgacggttccatcaaccagttgaacaccaatatgtatgtacgtctcgttaacttgacggatgacgatcagctgacagcagatggatcactgtcccataacttcagtattgctgaaggtaattcggactactacttcattctcagagacgatatcaactttgcgaagattgataacaaaaaagctgtagatacaggagaacgtgtcggtgcagatgatgtgatcttctccctggatcgtgctaaaaataaagattccgttccggatcaccggacgtacagtctgcatgaacatatcaaagaagctgaggttgtaacggatctgagtgcattacaatccatcaaacaatccagtggtaatggcacaatcctcgaagcattggaacaaggattgggcagcaaaattacagaactcgtgacggacaaaaccaaagcagataatagcgcaggtaaatatcaggtcgttaaactgaccacaactgaacctttcccgcaagtactgaactatctggctcaccaatctgcgggtatcgtgtccaaaaaacaggtggagagcatcaacacatatgatgtagcttcctttgacgtcaacaaagatattccttacggtgatcagaacacggtgactgaaggcgcagcatacaataacaccctttatactagcggaccttatattttgtcttataaaaatgactatgaaggtgtattcttaaaaaatccggcctaccgtaaaggcacgaaagatgagccaaaaattgctcaggttaacgtccgattcatcgcggatgcagacagcgccctctctgctcttcgcagcagtgaaattcacttatactacggtgtacctgaaaccaagtatgacatcatcgaaaatgacagcaaactgaaactgcaaagtctgccaagtaacgctgtctcctatctgttgtttaatacggccaatcgtgaagttgccaagagcagtgacctgagaaaagccgtgctgtactccattaatcaggatgagattttgagcttctacaagaacaacaaactcaaagcatactctacagtaagcccgctcgttcagaccgggaatgaattgaaagctgatcctgcaaaagtaaaagaattcttgagtaactacaacgcctccaagtaaacgcataacaaaaaaaaggttgtcaccaggatcatctatttgatcctgatggcagccttttttattcttccagcacacggcaatctgccagaacatcggggtagtttcgcatgctgtccgcatcagtaattttacgaataactttgcacggtacgcctgctgcaaaagaatgcggtggaatatcacgagtcaccacgctacctgctccaatgacacagccgtctccaatcgttacgcccccgcacactgtgacgtttgccgagatccatacatcgttaccaatcgtgaccggtttggcataacatagcgacttcacatcaccgttctggtccaccatctgtctccgctcgctggcaatcatgggatgaatgggggtaacaatcgtaacgttgggtccaaaactggtatagtccccgatcgtcacttgcgcgtcatcttgtatcgtcagattgtaattaccgaagaaatgctcgcctatccgggtatgcacaccataatgaaagaagatggggccttgcatgaatccaccttcaccgatctgccccagtaactgttgtaatatctgattcctctcctcagtctgttcttcaaaggtctgactgtaacgctgactgagattatgggctcgccttttgatgatctttaattcgggatcacttggactaaacaacacgcccttcatgattctctcttcttcacgcatcatgaatcctcctctacaagggttagcttataaaataaaagccacagacatggcctgtgggttacaaggcttctgatagaatgcctgacttcaacgcctgaagcaccattcctcgtaacccagcatcaaaatcatgttggaacgagtcctgatgtacaatctcgggcaacgtcggcatggggtgatccttcccgtactgtttccacgccatatccagctcttctctctccacccgttcctgataaatgacaatctggtgcggggcaacgacggcattaatcgtttgcaggatgtgacatacgttcagtacaaaatcatctttgctcatgtcacggtgccaatcaggtgaataaggaagatacttgatctcaccaaacatcccgtttttcccacggatcatctgtccattcaacatcatgcccatacccggcgggtatcggttcggaaaataaattcccgctacactccgttccttcatatccgcatgctgtgtacagtatccgctaatcgctgcattaacatcattctccacgagaacgttcagttggaactcgctctcgatctcccgtatcagatgtgaatggataagctcttcatgactgctcaccgtgatgtccccatccacggcttgccccggaataccgatgccgatcatatcaatggagggatactccttaatgaaacgtgcgataagttgcagcatatgctgtttatcaaaagcaggcaagatgcgctcttccttcaacacaaccttattctccagattcatgaccgttgccgaaatcaactcctggcctttcatctctttgatgtaaagaaccaaagcaagcttgaagttataattatatcgatatgcctgagcaggacgaccgccgttagagggaaccactttatcctggaacaactctccgccatcacataattcctgaatcagcgcattaatggtaacaacactaagattggttaataaagctaattgcggtttggtcgccgtctcaatctgctgcatgacttcacgcacattattcaaattgatgtatttcatcattgtagcgttggcttttttcataaccctctcgtttctactctggttcaattgagccaaagcaatggtatggatgtcattcacaccatatcataacataatgccttacttgaacacatgagttccatcgtgctggcaatggatcgaaatcggcagagctactttgttcactcaaacaaatcatccatcgatttcacaggcttcacttcaatcggttgctttgacaagaccatacttgcataggtacccgcccatattataactgccataataacgtagaccatccatacttacctccctgtttcatgcggattatgattttgagatacttaccacatgtgactattcctctagttaataaacaaactttataaagtatattacgtaagtatgcgaggataatagttctttgtcaatatgatttagatttatccgagcccttttcagtccaaggaacatgtggacaacaagactacaacaacgcgtattatctcgatgcccataaaaaataactgccgaaagaatcattcaacgattctttcggcagctgtttgttcaatatacaagcagtttattttgaatatattcgttgtaccccgggcaataaggtcacaacttgaatacccactccccatgcaaaatagaccaagtgaatgatagagacatcctgaatccagtacacctgcgccataatccagatgatgagagcaaaccccgtatacaacgaaaaagtccaagcccaatagcggtcaggatagagattcagtctctcacccagcccccaatgaacgtagcggatgagcgaaatagcaattattgtaggcatcacgccaagtaccagcaataggatgatccccgggaacaaaaaactggcaagaggattatgctcaaaccctctagtaccattctcacacatgaaacgtattgttcctgtgcttcttttcactatattgatctcgaaaatcattcgtaatggaaaaacttgataaaagaacgtacgttcggtataatgaaattatcctgaataagcgagaggcagatatggacgacaaatttattaaggaattacgcgagattagtcgggatgacagacgaagatcggaatttatgattcaaggtttgaaggaaacactgcaagaacgcaaagaagaaggcatactcaagcgctggatacggcgtaagaaaacagagaaaaaaatctctcaaagatttaatcaagatcctcactcggatcaaaagtaacaacataaaaaggaggcggaatacgcctcccttgctatttacatatttgaattatttagaattcattagttgtgacttaacccataagtttgccaaaattcacattatgctttcaataggtcaaatcccagctggacttggttcctgataagcttacttacctgttaccagttagctaaatgaaaaaagagcagcctgccaacctgcagtctgccccgtgctctatgaactaacgtttcccgttagcttataagtaagggtctctatagctcttttaccatcttcacaacttcaatttcataatttaaatgcttatagaaatttacggcacgaaggttattgttaaagacattcagtataagctgtcgatagcctttttgccttgaccactcttctgctttggtcatgagtcccttgccgaccccttttccttctccttgtggagaaaccgcaatcgccacaatataaccttgttctatatcgttcaatttatctttatgcggctgtacttcaaggaaacccagtagctctcctgtttcatcttccgccacaaaaatctcagtaccaggagaaagattgtctactgattcttgggctaggctgagctgtgattcttccattttgtctggatcacgccagctcatcagctcaaagtccataaatcgtaaagccagacttacaatgaaatctttatcggactcttgaaaagctctaatctgcatacacttaccccttatatataatataaattatggaatacctgttctaatcttaaaattaatgccgttatttctcccaaagctcgaccagtcgaccttcaggaacttcattcaaaataaactttccaagttcactaatctcttttttctttgcaagaagtacactaatctgttcaagatgcttcatagtctcgtttagattatgtacttggaaatttaacatcacttgttgttctgttggaaaataactgtcattctcgataaagactgtacctttttttataacttcaagattcttagttctccaaaatactcctccgaaaccttatatcatcgtatctaactcctgtctatcatcaaatttttagctatccgattacattaaatattcgaggtttaaattaaaatacctttttcaactattctgcccgttagttgaaagacagccgactatttagccggctgtctgcttgagtatcattctgagttctgtgccggatttatctatttcagcttttgatctaccccgttttacggcagaatggcaaaagaccggactgggaaaccagaagctttctccgctttgggtacaatattgaaaataacagcgcccttggccggcacctgatccaggtttgttaacagctcaacttgatatgtatcctgggcaagtacataatattctgccagaagtgctccattcttctgataatccaccgctgaatccgtatcaaaggtttcatgaccgatcgcctgtatttttctttcctcgaataaaaacatgagcgcactaaccgaccatccgggtgcatgactgttgccttcatcatccttgttatcaaatgtttcatggttaggccagcgtttgctccaatcggtacgtaaggctacaaagcttccagcttcaatcacgccatgctctctttcaaattcaagaatatgctctacatccagtgtgaaatccggattgttctctacttcggcagactggtcaatgaccacaagtggcaatacaagctccttcaaacctagttcatccagataccgggtatcccgaacgaagtggatcggcgcatcaagatgtgtcccgtattgacccgggaacttgaagctctgggcaaagaaaccttgatcgtgatcaaacagtgtatcgaattgtgctgcctcaaaagctgaaaaatgtggagagcctggaccaaacgtatgggtcagatccacccatttcttttcttttaacaattgaatggcttgaatgagttcgttggacatcctgatcacctcatgcacaaaatggaataaatttctcctattatatcttattccactacaattggggagcagtccctatattggttcttagggctgttaattttcaaatttaaaaacttcactgaccgtagatgtcagtgaagttaatttataatacaagagtaatccattcaatcatgaaaacaaaaggagcatgtatgatgcaaacgaagaacgtatatctatatgtatttgatacgatggcagattgggaggtaggatatctaactgctgaattgaactcgggaaggtatttcaggaaagagattaagcctttacaggtcgtaaccgtaggcgtggataaacatccggtaactaccatgggaggattgaacatccttcctcatatttctattgatgaatgtacattgaaaggtgacgacctcataattcttccaggaggaaacacctggatggacaccatccatgatcccctattgaaaaaagttgctgcctctatagaagagggtacggttattgcggcgatttgcggtgcgacagttgcacttgcaaaaataggaatactggattccagacagcatacaagcaatgatttagaatacctgaagatgatatgcccagattatactggagaaacctattatgtaacggagcctgcagtaaccgatggaaatctagttactgcatctggaatagctccgttagaatttacaatgcatgtgttgaagctgttgaatgtctatacaccagaaaccttacaggcctggtacaatctatatcagactcatgagtccaaatacttctacgagttaatgaattctattgcacctgaataaccagtttcccgcgggtatgatgggtttcactcttctcatgcgcttcccttactccctgttgagttagcgggtacgttccatcaataatcgatttgagcttgccttccgcagccagttcagccaattgatccagttgatcccctttgggctccatcatgaagacgttggccgttactccggcttccttggcaagcttctcatccggttgttccaccaaggataccagatgcccgccagactttaacaccttgaagctatcgcgctgaatatcaccgcccatggtgtccagcacaacatcataaccggagagaatctccgagaaatcttcttttttatagttgataaaatgatccacacccaacgaacgaagcaacgcttcgtttgattcacttgccgtggaagccacttcagcgccgagggacttggcgatctgaatggcatacgttcccacaccacctgcaccagcatgaatgagtaccttctgcccttggcctaaacgtccgtgatccacaagtgcctgccatgccgtcatcgcagccagcgggatcgctgccgcttcctcaaagctcaagttctccggtatacgggcaataatgtctgcatcaacagcaacatattctgcataggtcccgaattgacgcggacgtgcaaatacccgatcaccttctctgaacctcgtgacatttgagcctgcttcagccacaataccggcaacatcgccgcccagaatcaacggaaaattctccgctacttctttcatataaccttgtctgattttgaagtctaccggattcaccgacgtggcatacgtttgaattaatacctgattcactccacatgttggcttggctacttcttgttccttcaattgttccgctccaccaaattcctcaatcacaattgctttcattagaaatcccagcctttccattgattatggttatactctctctcccttcattaccctttcccggcgatcacttgacctattcattcaaaattcacagcaatctgggattcacaagcccgttcaacaatcgtgatataatgtccattatcgattacgttaaatcttaacccaataactgaacaagcgaggtaacacgatggaagtagaagtaagtacattacattcattttcggacaaggctcatgggggaaaccccgcaggtgttgttttacaagcagcgcatttgtctgaaacccagatgcaggagattgccagacaagtcggtttttcagagactgcgtttgtcatgccgtcggatcaggctgatttcaaagtacgttatttcaccccaagtgatgaagtcgatctatgtggacatgccacaattgctttattttatctaatgaagacacaacatctcgttaatgttggtacatatacactggagacactggccggaattcttaaagttgatatcgaagtcaatggagaagtctatctgtctcagacgttgccggagtttggggagatcgtggatcgacagcagattgccgattcgttacgtatttctatggaggatttgaacgccgagctacctgtacagattgtgtctaccgggttacccgatatcctgatagctgttagggatgttgatgttctgaccaaaattgaccctgacttccagcgtatcactgaaataagcaaggctcatcatgccataggttaccacgtgtttacactcgaatcagatgttgaggacgttctggcagaatgccgtaattttgcaccgctttatgatataccggaagagagcgcgacaggcacatccaatggtgccatgctctgttatttatcccaatacaaccagcttacagatcctcatcttcacacgtacacgatcagacaagggtataccatgaaccgcccctctgagatccgagccagattaacactggacagctctaatgaaatcacacagattcaggttggcggtagtgcaattcatatcaaaaacattcaaatacacctcccttagtgggaggtgtattacgtacttaggatatgtaaactatcttatgcgaagcagagtagtagcctgtgttcatcattgaatttgttgtaaaaatcgtagtaccgctacctccaactggttcagccctggctgctctataggaaaatgacctgccccttccaagatcacacattccttctccaccaccagacgatcaaaaaaagattggctgaacctgatcggtgtcatggggtccagttcagggtgaaccaacaggaccggacactggctgaactgttccgggcttacctccggttttttattaagaaatgttcttaataattccaacggaatacgtgtagctgccgcttgtggatcattcataataagcccggttaagtcctggttattagtaatcagttgcattcgggatacctgtttgaccgaaatacgtacatgatccagcagaccagggaacatatccatcatccgttttcccacccggctcaccagacgattcggtgcaagttgatctcgcatttcctgattactcgtgtctacaaatgtagttgcgatcaaacccttaacacgcttgctgcgtgcactggtgtgataggcaagcatacctccgatgctacttcccaatacaacgattggcttgccatcttttttgtgttcccgttcgatgagtgacacaagcaactctatccatagttcgtagttaatacgtgtaccagacattgcgtaacttaacccatacggcggaagatccggcgataccacctcgtatccatgtcgctgcaacatgcgggcatacggagcgagcaacctgccatttcctcccgcaccatgaatgaacagaattttgattgaagactccggcgcaggcaaacgatcgatatgcagatgaaccccatttgactcccaccattcttcctcaggagctgtatgctcccctagcctcacttcttccgggaaaaaggcctgatactgtttccaatagggatgtgttgtctgatatgaaggcaaactttttttcatacgttacattctcctctttttgtatacaaaaaaaagccgtacagtgtacgacttttcgttaagaatacgtctataaccatacttctttttataacaactccgtatatctgtcaatcgggaaactgtacattgcccggtacgatatatgcaccacccgatccatcgttaggcagagccgggatcgtgtcatttaatacctgaccgcgaatatcggtaatacgaacgtttagtttttctttgcccagtccagttccgaggaaatgattatagtcttgcttttcaagattgagccacgtgccatccttctgtttcacttcgaacttcagcaccggatatttgtgattacgaacctgaatggctgcccaccactgactgctgccttccttgatccgataggagacgttgccttgaattggagctttgaccactttccaactgatatcgattttgcctgcctttgggtcaccgatcaggttaaaggcattcggtgagagatccagcgctccgctggcgccttctggataaaggtctgttacatagacggttgttttgcctttaggaccctgcacctcgagataggctcccgctaaagcggctttgacaccgttataattgagttggaacggattaagtgcagtaatcttcatgtccgccgggatgggatcaagcaacaccgcacctcccgagtaacctgagcctgtatacgtcgcgtaaccctgatatgtatcgttccatgcggcagatgcaggtagagcaaataatacgagactgagcaacatccctgtaccggcccattttaaccgttgaaatctacttttcttgttcataagctattcctcctcgtccgttctcgtgtaaatggttggttcaactgctagatttgaatataacattattttacataataacttcttattttcaatccctctctaccaaatcacatctatagtcctgcctctggacttgaacattcacgaccacgcacaagatatggatacataccataatttggtggaataggtataataacaaggctgtattcgatgggttccccgtaataaaaaaacgccacaccccggagtaatttcgctctccaaatggtgtggcgcctattaaacactacggtcagaataccctatctgtcctaggacagacagcgtttgactcaacccgtttcccttcgtttcatccgcttccttagtcgctcatacgatgcgtaaatccgcggagattctttggtcaggataggccccagcacagccagaattaacacatacaacacggcaaacgattggatggatgccatcagccctccggccttgccgatgttcgccatgataatggagaattcaccccgcgagaccagggtaaagcccacattcaatgaggccttagggctcattccagccagtctgccagcgatcatacctgcaccatagttactggcaatcgtcagaataacggcaataatcgtcatcccaacagctccgccaagtgaagccggctcgatggtcaggccaaaactgaagaagaaaattgcaccaaaaaaatctttgaaaggcatgatctgatgttcaatccgactcacatgtcttgattcgcccaacacaagccccatcatcaatgctccaatggcttctgctacatgcagtgtctccgagaaaccagccaccaggaagagcagtgtcatgacggtaagcagaaacaactctgatgacttgatattcagtgccttatcaatatatttgatgcttttcctgccaataatcaggaacagcacaataaacagcagggcagacagcgatactaacagaacacttaagaatgaagttgccccgctgagcacaagcccggtcaggatagagatatgaatcgcgatgaacaagtcatcgaacatgatcatgcccataataatctctgtttcagggtttgccgtgcgtttcagatcaacgagcactttagctacaatggctgtagaagagctggtcatgatcccgcagacaacaagtgtctcctgaaggggcagatccatgaaccaccccaacagcaatccagagacaaaattcaggcccacatagaacatgcccccggtcagaatggctttgccagactttaataaccgggagaccgagaactccaaacccagataaaatagcaaaaacaaaatgccaagcctgcccataaattcaataaaggtcgaactttcgataaaacgtaaatccactatgccgatctgtggtgcatgtggtccaacagccataccaatcaggatataaaaaggaatgactgaaaatcgtaatcgtgaagatatcagcccagtaagtgtaatcagcgcaacggcaattcccacttcgaatatgagcatatccataggctaagtccgtccatcagtcaacaattgtttgagatgtttgatctgattccgttcaccggcaactacaattgtagctccagcggtaaaagcataatccgggcctggattaaaatgcttctccttatccttggtcacaacagcgagaattacggcgcccgtggcctgacggatatccagttcaccaatcgtcatgcctacgcttgcggcgtgaggctcaatccgtagccattcgattaacagcccttcaagcatcacttcacgctcatcctgaaacttcggtttataggtcataccaccaacaatagcggctaccgcccgggcttcatcatcgtccagggtgaccagagataccatatcacccacctcttcaggtgtatcccctgactccatatggaacaggtcacgtcgctcgtcgttatgaatcactatgaccaaatgctcaccactacgggtatgcagccagtatttacgtccaatccctggtaagtccgtctctttaaagtgcatgatctgcaccccctagcgccgactcgttcaaggtttcgctcctcagctcgatccccgtaatgcggattctcatggaacctgatggtgtatgaacagacttaacttcccctttactgccaagcagtaattgactccctactggagagaggaaggaaatacgaccctcatcaggattagtatcctctggcatgacaatcatgaacgaatctgacgtatgaaaatcgagatattcaaaatcaatatgactgccgatcaatacagctgagtccagatcttcatcaggacccaggagcagtttttccacatactctgtatatgcagacaattgtttttccaattgtatccgctctggatcacgcgcgtcgaaataggcgtcgagaaatgttcttttctcttcaccgaatgtaaatagctggctcaccagcttctctctgcaattatggcgggaggtcctatggttcataataaatttcaccccctatacaagccttgttctccatgttgattggcatgtttctcttcatcatcttgttttcctcctttatattttaaaaagatcccggaatacgagaccttcttaccatcttaccaaaactaatattttaatccagtatattcgtctaacttgcttttttattatcatttgtggtcatatcttccatttaataacttaattcttcacatcatatgatagatccatagaacattttaattactgcataaaaaacattttatgaattttcatctcgtatttttatttgctttcctgtatatttaactacaaacttttattcaatttatgcaaataagcctctacagactttaacacaataaaggagtgcatcgaaaaagtgtccacgataacaaaagaaactacagagtccgttcaagttactgccgcagaatatgttcattccgtttatgagtcggttgtcgccagaaatccgcacgaagatgagttccatcaggctgtcaaagaaattctggattcccttattcctgttattgaagcacaccccaagtataagaaccatagtctgttggaacagcttgttgaacctgaacgtgtaatcacattccgtgtcccatgggtagatgatcagggcaaagttcaggttaaccgtggattccgggtgcaattcaacagcgcgattggcccttacaaaggcggacttcgcttccatccttctgtatactcgggcatcatcaagttccttggcttcgaacagatcttcaaaaatgctttgaccggtctgcccattggcggtggtaaaggcggttccgacttcgatcccaaaggaaaatcggatctggaagtcatgcgtttcacgcaaagcttcatgactgaactttacaaatatattggttccgataccgatgtaccagcaggtgacattggtgtaggtgcacgggaaattggttacatgttcggccaatacaaacgtatccatggcgggcatgaggcaggcgttttgacaggtaaaggactgctgtacggaggaagcttggcacgtaaggaagcgactggcttcggctgtgtgtatttcgtgaaggagatgctgcaatccaaagggctcagcttccaagacagcacagtcgttgtctctggctctggtaatgtatccatctatgccattcagaaggcacaggagcttggagctacagtcgtggcgtgtagtgactcaggtggctatatacacgatccacaaggcatcaacctggataccgtgaaacgtctgaaagaggttgatcgtcttcgcatcagcgaatacatcaaagaacacccgcatgctacatataccgaaggttgtgaaggcatctggtctatcccttgtgatattgctcttccatgtgcaacgcaaaatgagatcgatgaagaagctgcggcccttctaatcaaaggtggcgtgaaggccattggcgaaggggcgaatatgccttccaccctggctgccattgacgtcttccacggtgcaggcgtgctgttcggtccagccaaagcggctaatgccggaggtgtagccgtgtctgctcttgaaatgtcacagaacagcatgcggttgtcctggtcatttgaagaagtagacgccaagctgcatgacatcatgaagaacatctacaccagctgtgtagaagctgctgaagagtatggctgtgaaggcaacctcgtagccggagcgaatatcgccggtttcctcaaggtagcggattccatgattgctcaaggtgtagtttaatttaaatacgtgattctccacgatcaaagggcgttcccatccatttgggtaactgcccttttttccttgtcttcaattgctctaaacgcaatgcaatggtaaagtggtactgacgtaattccatctatttgtactattataaggaagtgtttacattgtctaaccaaccatttgccagcactgcgagtcctcatcttagcgcagactgtgagcaatgttttggcctgtgctgtgttgccttgccctatggcaagtcatctgactttgcttttgataaagccagcggcacaccctgtcccaatctgcgcacggacaatcgctgcggtatccatacccagcttcggcagaaagggtttaaaggttgcacggtatacgactgtttcggagctggacagaagctgtcccaagtgacctacgcgggcaaagattggcgtgatcatccagagtctgcaaacgagatgttcgattgtctgcctgccttgcgacaacttcacgagttgctcagttatatgaaggaaatgatgatgagaccggagacgtcatcccttcactcggcatttggtgagttatatgaggaggttgagcgcttgagcaatctggagcctgcggcactcctccgtctggacatcgccaattatcggtccagtgtgaatcaactcttggtccaggcaagtgagatggtacgcgcgaatgtgccacccaccgctcaaggacaagggcagtcgaagaagagtaaaaaacgtaccggaagtgacttttttggtgccaatttaaaagggactgacctgcggggcgcaagcttccgaggggctttaatgatcgcagccgatctccgaaatgcagacacaagaaatgcggattggattggcgcggacttgcgggatacggatctgggcgatgcagacctgagaggtggcatcttcctgacgcaatcccagattaatgcagccaaaggtaatgtgaataccaagttgccggatcatcttaacattccctcacactgggtgtagggtgccatttccgcaagaacatgagcagagctacaggcaatatagtacctgccaattcatatgaatgtatgaatcctatacagcaacagcaaaaaacagctcgtcctatacatccaaggacgagctgtttctataaaatcactggaacgaatcagaattataacaagtcgcggcgaagatcttcagccgattttggagacaaatgaccgagcggaatatcaaataccgttttcgctcccttatgtccttccacgctcaaacgttgtgcggctcttgcatacgctacaagtacgcttgctgtaaattcaggattgctgtcgagtttcagaccaaattcaataatttgcttttgaccagcacctgtaaccccactgcgaattacaaatccaccatgcggcataccttcatgctcggatttcaattcttcttcgctaatgaacgttaccgttgtatcgtaatctgcaaaatagtttggcatcgacacaatcgtctcacggatctcatcctgattagcaccatcttctgctaccacataacattgacgcagatgtttttcgcgtgtagacagctctggtgtctcccctgcacgaatgcggttgattacctcttcaacaggtacagtatactgtacacccgccttaacacctggaacacgacgaatagcatccgagtggccttggctcacacctttgccccagaacgtgtactcttttccttctggcaagatggactgtgcaagcagacggttcatggagaacaagcctgggtcccaacctgtggaaatgacacttacgtgaccgccttgctctgccgcagcattaacttccttgtagaattcaggaatcttcgcatgtgtatcgaagctatctaccgtattgaacaacttggcgatggctggtgtctgctctggaaggtcggttgcagaaccaccacagaggatcataacatcaaccttgcctatgtattgctccgctgcagagatatgctcaaaacgtacttctgtgctttcagcgaccatctgctccggattacgacgtgtaaacacagcaatcagttccagatcctcgttctgggaaatggctttctctacacctttacccaagttaccgtaaccaacaatacccactctaatcatgttcaatcctctcctgtcttcttctatagttgtctattactctgtttataatgatataacataacatgtaacctgtcaggtttccagttcgaaataaaaataccttgcagcggtgcagcaataatgcggctccgtatgcaaggtattatggcgttcaatcgttattttaggaagaaaaaaaagcaggaaagaaaagtagcccttatcttctgcttatgattctgtccaggtcaacgtcagttcaatgacgccttcctgtcccgccaatgttcctccaatcaaggaccagacatcctgcgattccggatcggttccctgaatgataatatttttgtcatcgatcgtctgacctgcatccgtcaactttttggcgttgaagtaatctttatacagctgggatacggttttcatatcttgttcagtggagaaaatcaccatggccgattgcttgccttcattctcaccagaattggctaaacgaatcgtagcatcttccggcaacgggaaatcacttggcaagttctccggcaactcattggttccagcagttgcttcctcaccacgatctgaatccgagtcggttggtgcagtcgtgccctccgtttcggtcactgcacttgttgttgcttcgcttgcaccttcattagtcgcttgttcaccagttccagaggaaacttcagtgtccaccttctccgtatcactcggttcgtctgccgcgctgctgcaagcactcaaggccaccatcatcgccagtgccgcacaggccaatacatatttccttctcttcaccatctgttaccactccttcttcttcgtttcatgtgctaatcacgttcaaacgactggatcacaggcaccgcatgaacgttattcttaacccatatcacagatacagataatacacttagagacaatagacaactgactacaagaatggacaggaagcgggtgattactttaaactttttcatccatccctcctcctcctgttcatcatgtatttgtggaatcatgttactcataggtcactggacggtgtcactaatttcatgatctcggcggcgacaatatccggttgactgttgtggatactttgtgtcgcttgtggaaccgtcagctgtgttccgtgttttgaccatgaagcaaaatttgcttggtcgtcctgccatgcatgactgtcctcatccaactcctccgaaccggctgtgaggatcgtcagggggaagccaaacttcgttttgttctcaagcacacacgctgcatttgttctggaattccgaacctcttccatgacattgtcattgtacgcatgtctcagcgtggatatcgtgacggcttttttcatcggttccgttaccagatttgggtcaatgaccagagatgccatcatgcgatccgattgcagcaatgttcgtgcgatgcctgttttcaccagaaaacgggaccaatccatcatccattctggtgtattcaagtctgtacgactgtaatactccgggcttccgccatcgatcatgaccatgccagccacctcatcaggatacctttgcgcaaaccgcagtgtctccagcgcacccagggagtgaccgaccatgatgtaaggtggacgttgaccggatgttcgcagcaattggtggatctcttccgagatggtatcaacatcacgagggtcatccgtatagtcgctgtatccatacccgaaccgatcatataccgcaattttcacctgtgatttcaacttgtcatatagcggactgaaatccacatacggattgggtgtaccccagcctgaggcaaacaccacggttacctctcctttgccggcggtgtagaggtgcatgttgcgaccactcacttcataatacttgcctggcgggggataggacttcatatcctgcgtggattgataggcttcatacgctgtacctgccatcagcaaaagtcctgtggcaagcatgatgcctcccagcacttttaaccctctccgtaaccccttcttcatcttctctaccccttaccccaaaggttcatctatatatgtatgcttcaatcgtacccaagaaatagcgggattgaaacaatcccgagtccagttctttccccaaccaaagtccagtgtccctcccctacctgtgacgcaaaaaaaaactgcaaatctcccattcaggaaacttgcagttcatctatacttgtattctaaaactcttacctcaatctatctcacgatgatccttacctatagttgcaacgtaagacccaccgggcaatgatcactgcccatcacatggcagtcgatatgcgcatctgccaccttaggtgccaattgattggatacgagaaaataatcaatgcgccagcccacgttccgttccctaaccttcggcatataagaccaccagctgtatacatccgtacgatccgggtacagatggcggaagctgtccacatacccggaagcaagcaaatcggtcatcttgccacgctcttcaagggtaaatccggaattgcccagattgggcttcggattcttcaggtcaatctcctgatgagccacattcaggtcaccacagacgataaccggcttagtctgctccaattgcagaatgtagccccggaatcgatcctcccattccagacgataaggcagccgggtcagatcccgcttcgcgttaggggtatagacgttcaccagataaaactcatcatactccagtgtaatcatccgtccttccggctcattgtcctcctccatcccgtaacgaacggataaaggcttgattcggctaaatacagctgtgccggaatatccttttttgatcgcataattccaatattgataaacatcttcccccaggtccatctcaatctgtccggcttgtaatttggtctcctgaaggcagaaaatgtccgcctgactctcctgataataatccatgaatcctttggtcacacatgcccttaagccattcacattccaggacaccagcttcatatcctcatctcctcacatctctccaatatatcatgggctcattcagagggacaagccttacggctctggaatgagatggagtcattggaatccttgtgggctagcttgcctatatttcgcttcgtaacttagagaacaccgcaaggtcaatatatctgcctttctcaaactcatgctgccgcagtacaccttcctgttggaaatcaagtttatgtaacaggtgaattgacgcctcgttctccggttcaacctttgcttcgatcttgttgagctgcatgcttgtgaatccaaaatgtaacacagcacgggccacttccgtcataacaccgcggccccagaaagaggaacgcaaatcgtatccaatctctgcacggttatgtacatcttcatagttcaggaacccacaggttccgatcactttacgagtttcacagtcttcaatcatccagcgtaatcccgtgttttccttaaaaatcttcgtataccaattcatctcaccctgtgcatcctccacagattcaaagggagtgaatggcatatattgaaccacagcttcatcggaatataacgcgagcagatcatggctgtctccagcgtcggctgaccggaggatgaatcgttctgtctgaattaatggaaatagatcaaacctaaattgctcactcatgcgaggtctcctttgcaacattcattgtagaagtccattttactacacttgccttcatcaagcttttactattaatatgttctattaaggcattactgtagaaaaggatacataggagaggacgtgctattatcacacaatcatatgacgttattatcgttggagccggctccatgggtatgagtgcagggtattatctatcgcgcagtggatgcaaaactttattaatcgatgcctttgatcctccgcatacggaaggaagtcatcacggggatagcagactgatgcgccatgtgtacagtggtgggcctgactatattgccatggcattacttgcacagaagttatggcacgagctggaggaaacgaccggagaccaactgtttgttccttccggtgtaataaatgtggttgatccggagattcattccttccacaaccgattgagccatgcagatgatgcaggtattcggtatgaaacgttgcacgcagccgaggtgatgaaacgctggccaggtattacaatacctgaacattacgagggcatgtatgaaccggatgcgggttatttgtatagtgaaccttgtattcgtgccttccgcaaggcagccgaaactcacggtgccaccttgttaacgcacacgcttgtggagcatatcgaatacggaccacattccgtcgcagttcagacttcaggtggtgagacataccatgcaaatcaaatcatcctgagcgctggcgcttggtttcagacattaaaacctttcgtggatctccccattcaggcagtgcgtaaaacggttggatggtttgatgcaccagaagctttgtacggcgaggaacacttccccggttttacactggcaggaaaagaaggtacatattatggatttccaagcattggcggatcaggtctgaagatgggtcgtcatgatacgggtcaggtgtggacaccaggaagtacaatggctccatttggtacggaagaaacggacgagggggatctgcgcaggctgctcgaacttcatatgcctcaggcagctggagcattgaaacgtgttagtgtgtgcaagtatgaattcacttcggatgaagattttattatcgaccgacaccctgcccatgaacgtgtgtggctcgcaggcggtttctccggtcatggcttcaagttcgcaagtgccattgggcagattctatccgacttggtgcaaacggggcacacggatcaggatattagcaggttcaccctatcccgtttttgttaagtaccagctgggtggatgaatatatgtatgtctaaaatagttacttttcttgagggtacagtgttgcttagagcactgcacctccaagaaaaaaggacacgtaataacgtttaattcatgtgtactcacactaattaactttgacgaggctccattgctgattggctccgccattgtcggcccactgaatcgtggaggcacctgcggtcagagaaccttgattgatgtcaaccgtcaggccactatttcgattcgcaagtaccacatatcctcccacatcaattggcagccattgctgattgttgcccccgttatcctgccactgaatcagagcggctccgccttgtgtggaacccgaattcacatccagcaaaagcccactgcctacattgcgaatgttgtaatatccgttacctaccgactccagcttccattgctggttagctgctccattatcattccactgaatgattgttgccccacccgtagaagaagcaccgttaacatcgagtgcaagtccactgttgcggttgattaatttgtagatggctccggattcatatcctgtaccgccattataagttgcaccggaaatgacgtaggttgtgaccgaattggccttggccgtagcggtaaaggttttgttttgcaccgaaatattggtcagttgctgcaacttctctgttgaagaggtccgatatacttgagcagccgtgcctgtgttagtaaaccgactgagatcataggttaccgttgtatccgtcgattccgaattggttgttaccagcacaactttgccggaggctgcatcataggctgcaagggtattggcatcattcatgccgataatcttgtatccaggacgaataaatttgctgtaattgcccatgacataatatttttggttcacggtgtaactggtcgtttgcgtattgttcaacacgttcttgaaaaatccccatccttctgcactatcgacggcttgccaatacacccatccacttgcacccatattgcgaatatccttgaggatggtccgtgacatcgtaagtccgcttgcatctccgtctccatattccgaggtccacagatgtttgcccgcagacgtcgctgtgttgcgcaaagcagtacgattgcttccgccatacgtatgagtgttgatctgagtgatcgctgatttaacggcattgctgtagctgttgaacgacacattggtatcatcgatactgtattcttctggtgcgctcagctttgtggacaggcccttcgcattcaacgaagcttgtacctgactcagaatcgtgttctgatccgcccggtcaaagtgcatgccctcctggtcattaccctgcttccaccacgtcgagatcggttcattcagcggagttacactatcaaatgtgatcccccagttatcccgaaaatgcttcacaacctcagttaagtaatcggcaaaatcatcgtagtaatcgggcttgaggttgttacctccattggccgaaccggacacattaccactgatcgtcatccagtaaggtgcggaattcgcaaaagcttcgatgacattcacgccttgagctttggcagcttgcagcatatatcgttggtttgcatctgcattccagtcatacacaccgggagaaggctggtaaccaggaacggctttgcgatattcaaggatattggacgatggattatccccgcctccaatgttgtaccgcagaatattcagccccagtccggtatttgcattgaacattttctccacatactcatcccgattggaatattctccaaccactttgccccaccacgcgagggatgtcccccatccttcaatcgtctgatattgcttcgaaggatcggcaacagccgtgtaggctcccgcagcagatacctctgttcccagacccaaactgcctgttagcagacttcctgccagcagtagcgagctcattcgttttaaccacttcatccgcttcactccttatgattttacaaaacacaaacacccattattgtgcaacctctcggaaggtcgcgtctgacttatcgattgcggtaacgacagcttccagtttcagcacattattgtaatgtctcagatacaggttcgggttactaaacgaggtatacgatgtccaactagcattagcaagtccatttacacgtttgaacgtggcgtcatttcggaatgtagtgctgccgtcatttttcacgagtgtgatgctgccattattattgcgcaggaaataacccggataattcatggactcaaacgaaatgcctgttgcatttgacagcccaggaacgatacggaattgtgcatcttccgccggactgacattggcatcaatccgtgcctgatagttgtaatgacgaatgaagctgcctggtacattgaatgactccaacttgcggatatcccccggttgtccggactctttcaatacggtcatatgccggacgagtccggtaagacctgcaatctcttgtttggcaccccaagtctggaagttatcagcagagtcgctgtaataatatttttgtgttgcatagccgtcaaagtagattcgccatgaaccattatccagctgaacaagcgccggaccttccacccaagaaccccaacctgcccaatcccctgtacctttaaaggtataaggacccgttagcgaggttgctgtcgcatattcaatgtatttggtggtctcgttcttggtaaaagcatgataggttgagcctgtcttcacgataaaagtgtcgatataattgggagcaatgcctgccagttcagtaggtgcagaccatgaggtagatgttagattgctgcctgaagctgtgagtacataaggtttgaaattctgatagttgcctggtgagagggacacgataatgttcagactgccgttgctgtctttgaaccattctggtgcccaggtgtgtgcaattgtggtaggtgtggataatgtaatattacggacaaatgtccagtttaccttatccgggctggaggcgatgccaatggtgttacccgaccagttcgtggtgtaaacaacgtaatatagaccatctgtgtgcttcatgatgctgggatcgcggatcagatcggccggaggtgtataggctggcccttttagcaaaccatagtgggttgcattatacgattcatagatgtacatattggactcacttgtgttcgtaaaagcggatatcgtatatacacttgtcgctgctctggctgtattggggaataacattgttaatagaagtaatgttccgagcagcagaatcattccacccttgaaacctttggactttcctactcttactcctactcctcctattccctcttccttcttcgtcaacattgggtcatctccttatccatgagtgatgaacagaggaatacctcactgtattaccaaagacaaagcgtacctggggctgtccctgatgaccaatacctcacaactacctgttcaaattccaactacatgaagcatcactcccttcacagatcatggatgaacactctttatatatgtaaacggttacaattaattaaactacaagtgttaccttagttcgttgtaccaacctgatcaccacagttcccccattcccttagcctaattcactcacaaaactgaatccgaagattcacaagctcgagttatttgactaagaaaatgaggtagtgtgactgtggtaaaaggtgaaatgttgcgtgcgactcgaactatctcgatccagttattgttctcaactatagttggatcagtaagacagctaacgatccatgcatgaactattccaccacaacccacggataacgggataacgcatccaacaggaatcgtacacgttctggtgttctgccttcttcatcgaacaaaagtaattcattctcttcctgtagccaagctactggaattttgtaatcctcttgcggaccaatctgccagtaacggcccagatgatgtccgttcaggtgaatcgttcctttgctcattccggtcaggcgaagcatcaggttcaccttatggtgctcggaaatagtaggtttcgcgaaacgccagcggtaccagaccggctgaccatacgatcctctgactggagtatgattggatacagggtgagacttctcactcaatgtagcacgattaaccgattcattcgtggtgcggggcaccagattggcagtacaattgccacctgcggcgataccaggctgtcctgcacgttggattgatccctgtccagaatggagcgattcctgtcctacctcgtagctctcccattgttgcggaagcaatgcatccgtcccttccatacgccaatccttcagttctccctgactcggatatgtgatcagttccagtcgattcagcgaagagcggctatacggcatttccagtgtatttgtctctccggtcttgatatacaaggatatgtctaacatctggaaggcaaaccaatcctgatatccttccatcggaacttcgataccattgatacgaagacctttgctcaaggcacccacaagaatcgcccgatccatgccatccagagtaaagcttctgctcagcagtggagattcttggagagagttcacctcatcgagatgcacaagtccactttccatacgccaatcccgacgaatatcctgaacctttccatccagatacacagcaccagccagacctttgctctcacccaaatacggagagaagttcaatctgcccatatgctgtaccagaatctgaagtgtattcttccctttggcgatctgcaactgcacacctgctgcccctacctgacgaaccagtgcctgctgtactccattgacaataattctggcggtatcctggatgttcggcaaaatgagactagtgattccttcggttggactctcgaaatcacattcgtacaataaataaccaaaatcttgtccataccgggaaaagtcttccggttgtccactcgccgaacgttgcttcgcagttaacgtaatacgtgacatctcaggagaatcagacaatgtcggcgcactcggtaatgtccacggaagctgctgctgtttgcctgcaatagactcctcgctggcatagaaatcgtgacctgttaacgtttgttctccatcggtccagtcaccaagcagcgtaattgtgcgatctgggtcagtaatcatgcccttgacctgacccgatggtaatacgtctacgtcatcgaagccgatcacataacgtagtcccttctggtctgttgcttccaatcgccatgttcgattcatcgtttcttgatccagaatcatgaaacggatcggtgtgccgtttgcttccagttggattgttcccggttcttggaaatgaaacagatcgaagcggtatacgttccttgctgaatcatgctcgaccagcacttgcaccgtactgcccgtgacattcaatgccccggcttccagttcaacaacagaacgctgtcccgcagcggccacgatgaacagggttaattctccgtttatcatttcattgcccgtaatcatcgtacccgcagtcaggtagacgtgttcagcaatctgtactcgatccagcaacggaacaatctgtcctggattcagtgatacaggaagagtccgaccttcctccagcgtaatgtgcatggtctcccgttcatccttgtgactctccaggaaccaaatcttctggttgttagcctgtctgcctcgcacagatatgccttcaggatgacgtacaacgatctgttcttctggaatttcctctgtttccatcagaagggccccgaaagcatggacgaaataggacaaattcttggttactgcatatttcggtgtcacccgtccatattcgttcaggggtgcatcatagtcataggacgtaatcatgaagatatcactgctacccatcgttctgccgccatatccaccaaagttcgtgccaccatagaacatgtagtgactgattccggtatacccggcgcgtaaaatctccataatacgtctctccagtaaaggcgctgtcttctgaatggctgaaggccctccccaattctcaaaccatccagtccagaattccgtgaccatcttcggggtgtccggttgtttggctcgaagtttctcataatgcccgtcagcacctgaccagaaattagccccttcaatcgtgccttccgccccgccaacgcaagtgatcagcgtagcgtcaatgccacgttgcaacaatccatctctcagcgtattcatatggtcacttgcagcagtatcatccatcagatacccatattcattctccacctgaacgagaatgaccctacccccagcggatagctggcgttcccgaataatcggcacaagccggtcaaaatacaggttcacatagtgcagatacgtctcattgttttcccggaattttacgccgtccttcgtacctagccagtatggaaacccgccaaaatcccattccgcacagataaacggacccggacgcgcaatgacccacatgcccagttctgcgcacaaatccagaaatgctccgcaatcgttgtccccttcaaaggaccactgtccttcttccggttcatgcacattccacgcaaagtaggtgtcgatgcagttcatacctgccagcttcgccttcagcagaacctcacgccattcctcctttggcatacggaaataatggatcgtggcactgttcagaaatacacgctctccgtttaggaaaaagctgcgtgcatcgtatgttaattcagatagaacaccattctcagcccaggcgatgttcttctcctgttcctgcagcaaaagggatgctttctctgtcaaagtaatcccctccttctctttattgatataaattgaactaaagattatttacactgcacacttcgatgacagaacaaccttccgatcgctgttatccccagatttttttgattcccttttctcaaagggaaaatccggtgataaaggcgaacgcttcgctttttcaggttttttctgtcctctccatttctgtgtaaatgattagttcaaaatgatattgttcatattcataccagcactcagatgaccgaacaaccttccgagtgctgctatcagttcgcctgcaacgtcacgccttccagtacaacggttgtgatggaattgtctgccgtaggtacctccagtccgttggcatacaccgggatgtctttctgctgttccatgttccgttccggtgaagtttgatacacctgcgcggtggctgattttccatacgtataccctgccagttcaaacgctgttgtacccgctgacaattcgttacgaatcaccagcaccagtctctgacgttccgcgtcataggcagccagtgtgcgtccaccatccgttggaataatcgtcgcgccgggacgaataaacttcgtgaactgggccataccataatactgtttggtcatctcgtactgctcttctccgttgaaattggcatgaatgaagccccaattgttattggcaccttcatcttcaacggcctgccagtatacccaggcggatggctgcatgattttcagatcaaacatgatccgctccgccaattcttgcaccgaggtcatatcctcatgactgtgtggctcgctgccgccggttccgtactcggacatccacagctttttgccttggcgttctgccagcgtgcgcagctcttccattttgctaccattataggagtgagtattgatctgctggattacgtccagcgtgtcctgatcatagaggttgaaattaaacaccgtctcatcaatgctgttatcgtccgcggcactaatgacggttccatccagtcctttgctcttcaacgatgcagcaactttcttgataatctcggcctgtttctcattggtaaaatgactaccttcctgcatattgcccttcttccaccagtcggaggaaggttcattgagtggattcagtgtgcggaaggtgatcccccactcgtcccgataatgcttcacgacttcagtcaaataatcggcaaacgcatcatactggtcgtcacgcagattattgctgccatccacagctccggtaacggatccactgatcgtcatccagtaaggtggtgaattggagaatgcttcggtaatgttcacgccacgctccatcgagccttgtaatacagcccgctgacctgcatcagcatcccagtcccactctccaggttcaggctggaagccaggtacatccccgccgggacgaagagctttcatctccggattttcctcgccgccaatattgtaacgaacgatgttcagacctaatcctttctccgggtcaaagaccagatccatcacttcactcaccttcgcctgatccttccatcctccaagatcgttggcccaccaggcaagtgacgtaccccaaccttcaaaatgatcataggactgatccagcttcagacgtactggttccccttggaactcaagtgttttggatgattcattggcaaaatgattgataacaattcctcctcctgccagcagagcaatcagagcgacacccatgaggatataactccgtttgcctctgctgcgttgttctttatgcgccatgggctatacaatcctttctccatgtacgttgattattccgttgaccctgaacatcaatttcaatacatacaaccactacagacacttcggttacttgattccgctgcttccgccgctaatgttggcttcatagacataacgttgtccgaacagatataccagcaccatcggaatggtgaggaacagggaagcgatcatcacgaggttccatggcggcatctgcccgccacctaccgtagtcaacagctgcaccccaagtgccagcggcattttctccggatcattgatatagatgagcggccccatgaagttgccccagttataggagaatgagaagatcgcaatggccgcaagtatcggataagtcagtggcatgatgatcttccagtagattcccgggtgtcccataccatcgatcatggccgcttcatccagtgattttggaatactcatgacaaactgccgaatcaggaatacgttgaacgctccggcgaagaaactcggcacgatcagcgggtagaatgtattaatccagtccagatgacggaagatgatgaactgcggtaccatcgtcacctcacccggaatcatcatcgtactgagcaacacaataaacaggaaacggctgccttttgctttgattcgggcaaagccgtaggatacgatcgaagctgataataccgatccgacaatcgtaaagatggttatgatgaccgagtttttgagatacgtgccaagattgttattcgtgaagatggtataaaagttcgaccattggaactccattggaacaaaggtaaaggctgatttgacggttgttgcgtcacttgccagtgcaatagagatcatgtacaagaaaggcgaagcaagcagcaccccgaccagaatcagaaaaatataggatatcgtcttctccacagtggatggattactcattggcttttccctcctcgtagtgcacccatagcgccgatgaacggaatacaacgagtgtcaacaccatgatgatgatgaatagtacccaggcaatcgccgatgcatatcccattttgtagaattggaatgcattctggaataggtagggaacaaccatctgacttgaattgtcaggtcccccggcagtgacgataaatacctgcgcgaaggtctggagcgctccaatcatgccagtcacgagattgaagaaaatgacgggagtcagcattgggaatgtaatatggaagaacgattgtgtacttttcgccccatcgatggcagcggcctcgtacagctcctgtggaatgcctttcatccctgcaagcagcaataccactccaccacccacaccccataaggacatgagaatcaatgcaggcttaacccagttgggatcaagaagccaggcaggaccctgaataccgaagatcgcaagtgcctggttgatcaatccttccgtcggcgcaagcaagtggatgaagagcaatgaactcgcaaccaccggaacaacggaaggcagatagaacagaatacggaagaaggtgatccctttgatttttttgttgaggtaatatgcaatccagagcgagatcgacatgcccagcggaatggatattagcgcatagaagaatgtattgccgacagatttccagaagatcggatcatcggtcagtaacgttttgtaattgtcgataccgatgaattcaggggactggaacagatcccaattcgtgaagctcatatagatggaaaacaggatcggacccagggtcagccccagaaacccgatcagccaaggcgagatgaagatgtagaaccatttcccgtccttttttctcacgttaagccctcccatgacgcagagagcagatggaacccgcattcacgccgattccacctgtcctgctgtcgctgctatttgtgcatgttcagaaaatcctctatttgtagagtctttccagtccactctgaatttcggttacggtatcatcaagcgtggctttgttgttgaagtagacacccagcttatcgttaatgagcttcatcatttcgttccattgcgggttgaatggttccgcatagatcgttgattcactgaacgcagccatgttgatttttttgccaccgtattcagcattgaggaattcatcactggacagacccgctttggttgcaggagcatcctgaccggctttgaccattggcatctgtgcttccggtgtggtcagtgcttcgatgactttgaatgcttcttccttgtgtttggatgcgttggtaatcgttaacccgttgaagaatgcgttcgtctcaccccataccggagagatatcccaattaatgccttccaccttggcaagtgaaccgatgttccagaaccctgtagtttccatggcgatcttgccttgagcgaacagcggatcagctccgatattccccatgtcggcaatctcggttggcgttggtcccgcaccgtgtgtgaaggtcagatcattcatgaattgtaatgctttccgcacaggctctgtattgaaggttggtttgccactctcatcgaacagtgagccaccgttctggtagatcagctgcatccattgcggccaccagctaccgggatagtaaccccattgagtcgttttgccgttctccttcaccgtcagcttctgagctgccgccatcagatcatcctgcgtccaatctttggttgggtattccaccccagccttgtcgaacagatctttgttataaaagaggaccatcgcacctgcacgatccggcaaaccaaattgtttgccatcatacttcatcaggtttgcgatatcatcggaataacgctcggacatgttcacattgttcgcctgaatcatgtcatccagcggtataatctgattcttggaggcgtaagcctgatagttctcggcaatcatcatgatgtccggtgccgttcctccggcgatcatggtctgtaccttctggtcataatcccctgcaaccacgttcagcttcacgttaatatcgggatacgtctgtttcacaatgtcgagtcgttcctgataaatcttcttctcatcctccgagccccagattgtcatgctcaaatcaaccttgccaccggactcgccggaagaaccgtttttactcccgctgctacaggctgtcagacccattaccatgaccagcatcaataacgaaatgacctttagacttcttctcatacgttacgcccccttgatataatgaatggatgactacactgaaacccgtttcatgaaatgggtttcattaagctgaaacataaaacccgttccactttatgaaaggggtttcattcacgcactcattatatttcaccctttgaggaaatgtcaacgctttcttttccaattacaggccctttatcttgcagcaggtcctgtactttgacgcacaattagctccggttgcagaacgatctgcttcttcggtttgccttggttaatcaactcatgcagcacatctacagcctgtttgccaagctgatacgtgttctgggatacggttgtcagttccggtataacggcactggcgagcggcgtatcatcataacccacaatggatatatccttcggaatcgagagcccatgctcaatcgttgacttaatggcaccaatcgctgtattgtcattgacgcagatgactgcggtgggcggattgtcacgatccagcagtttggacatctcccgtttgccgtcgtcgatggagaaactgccgaggagctgacgctctttcgggatttcgagcccatgctcgcgaagttttttctgcacagctctgaccttgaccatggtggtggataactctttcaggccgccaacaaaggcgatatcgcgatgccccagttcaagcaaatgctccgctgcaagggctgcccctgcaccttcatccgtgtacacccggtggaacccgcctttggcaatattgccattgaccagaacgattggcatacgtttgcccatatcaatcaattcctgcgccatgtcatccggacagacctgcatgttaatacgcccgccgagaaaaataatcccgtctacccgcttctctcgtaggatggacaaatattcagattccctgttatagtcgcctgcggtattacacagaaagaaggtataccccaatccgcgagcctcattctccgcgccccagaacacttccgggaagaagggattggtaatgtccggcaggatgatggcaatagtgcccgtctctttcttgatcagactgcgcgcctgcgcgttgggctgaaactggtgtttttcaatgatggacataatcttctctcgggtgcttgcacgcacaggtgccgtatcattcagtacccgggagaccgtcgctacagatacatttgcttctttggcgatgtcgtatatggtgatcggtgtcatagcggaaccttcctttttctctaattttccctattttccctgcttatcataccagataaggaatggcgatgaaatgggtttcattgacgggcgaatgatttcacactgaacccatagaaattccgggtataacattcatacgtaaattattctttgcattacgcattagcgtcaatatatacaggacatgtttgcttttctttatttcaccttctaatctgcgtttatggtccatatattaaattgtaagcgaattcattggagattagaggagtgtgaacaacgtcatgatcattcaagtcagtccgctggcagaagcaagacttactgaaaagctgggagatcgaccaggctatttcaaattgttttatgataccgatggatgcggttgtgacggaattgcggtacttctgatcttaaacgagccggatagcgatgatgttaccgtagaagcggggtcgcttccctttgtaatcaacaaacagcagcagatttactttgaaccgtctctgcgtctgcaatccgagcacagtttcccttcattccgactgagcagcgattccatgatctatggcagtaatgtcaaagtccatgatttacgagataccgcagacgtagcccctcagcccactggatggtttgtacgataaacgtttaattagcactataatcaaaacctcccaagcccagatgtcatgcgggacgggaggttttttatcatttctaatgagtttattaggcattattttcgtaaacatttcatgtgagctaacgtttgttgtcagttaaatattactaagattacttcacaacaatttcaattgagttcatggtcatagagatatccgcggtcatatccacaatgaggttttgtttcccttttttggttactatacactcatcttcaacctcaaccacttgacctgacttaaactcagttacatatcccacatccgcataattacgctgctcgttactaccggagaaggaaaaacgaatgattggttctccatgagatacttcaacaggtttaatacctgtatattttaatgttccttttactttcaatatctcacccgtacttaaaactgttggtgttgttacttcgagaataaaatcagatgttactacacgttcagtaattgtatcttcatttttttcttttggtgaacatcccgcaaatatcatggataccactaataccaacattaagatgttattactcattttattaatttcatatcacctctttcatattctaacgaatgatgtatagaaagggttgctcaatttgttccttgattctcctgaactatcgtttactgttagttcaatcatatatcacacgaattcaattaacttcttatctatttctgcgatatcaccaatctccgatgtaccatcccataggataatggaagaagcttcatcgttttcaacaaaatcatcaagttggcacaattcacccatgaacagagctccatactccgtccgttcgggtccatgaaaacttggctggagtctaaacttcattagccctttgaattcagtcgtatccatattttgattggtttcctcaaacaattctctaattacacattgctccgcattctctccagcttcaataataccacccggaagttcccagttgtttctccacttattatgcatgaatagatactttccttggcacttcaccacaattagagcatgtgttagtggagcatccagtgtgcttgtaatgaccttatcgtactcgatacgaataaattccaaaaaaatgttacctcttgaatctgtcatgattgccatttttactcctccatttcttttgtaacaaaaataaaaaaacgcgctagacctaagtcctgcgcgtcatatatcacaggatgggaagcgcgaatagcgttaacccatcccaaatttttttaggaatggattaacgcttttcatgatggtgaaattgttttaattctaaaatcaacataggccattctcctaatcatcaatatatggaaataatacccactatagtactttaaagtcaagtatataattttgctcatttaccaactttcgtctaataaagtattcacctttgattcatggtctctcagtgtgccgttttgaaatttgatgtgagagaaaaagggaataagtagaataatattgaacaactacataatcattaaaataatcgatgatataaatgaggttggcaaaatgaatagtcatagaaactggacagttttatttattggtggagcatcaggaataggtaaatcaagtattgcttatgagattgctcgatattatggtgtgaatgtcttggaagtagatgatgttcacctatccgtaaaaacagttacaacaaaggagcattttcctgtaattcattattgggattctgatatagatgggaaatactttggagttgacggcacggtaaactggctgattgatgtcagcaaagaaatggttccagtattaaaagagcttgcaaaccggcatattgaagataaattacctatcattattgaaggcgattttatctatcccgaattaacattatcttttgataacccacaggtgaaatcaatatttgtacatgaatcagataaaaatcaaatagtgcagaattatttagcaagagaaggtggcaaattacaacatgatagagctgaagtaagtatatcgtatggagattggatagcagatacctgtaagaggaatggaattgaattgattgaatcaagaccttggaatactactttaaaaagagcaataaagcgcttagtgtaatacggacattaggataaattgcttcttgtagctctatgggaattaatggcacttattgaactaaactgcccattagttgaataaaagcagccaatcaaaaatgatcggctgctttctttgttttattcagctaacgtttcccgctagcttaagagtaatttcacttttttaattgagtcatctttttcaggagtacggcagtgcaaacagatataacactggctaagtataaaagagcatatgctatggcagcataatatgtaagttcagcttcaatatcggagcttgtaagaagcagaataatggaaaagccaacaacaaaaactacagtacctaacagaacatttttaattccttctttcacatactcacctcccagggatttttgacagttcccgacctgctattttagcgtttataatttttcctcccttaggctattcttgattgtgatctagccctttcccaaaacaagtctttcggttgtatgattcgaaaaattcggaacgaatatccagtgttttaatagtgagtagatatccatttatcgtgttagtaatcatttcaatttcagatacattgtatgaagttatatccattttcgaaatgatcacttgcttactaagcacttttgataaagaagaggtaatttgtttctttacatcgtcatttaaacttccaaactggagtacaagtctttcaaggtcatccttgctacctttcatcaaactgtgggattggatagcactatgctttggagatgaagacttgatagcataaatctcaatgatatcatccattttaaatttaaagtttttaccttcttctgtttcaacaaataggtagtcttcctttaattctttagcaacaccacggaaaaattcatctcgattattaactttaaatactacagaatgttgttctttaactgtcatctcaataaattttctcttattcatcatattatgcaatgtgttcccctcccttttaaagataaagtattctatatgagatagtatattattccattgtccttacactaacctgcccgttagttcaataagttagatgaacagtttcgtccgggtctgcaccagctgatccccatagttccccttcaacgcgataaccgccaccactccattgaagcaagtagtctccagtactcataccctgtgtgaaaccttctttactatttatccaattcaaagattccccgggagcaatcgttctagcgaaatacaatttactagtatctaagtgcgttaaactaacattgacttcatggctactattgtttttcataagcagttttatatgtataaattccggatttacggaaaagggttgctttaccgttgcgcctccagaagcaataaagtgggacggtttgctctcttgttcgcttaaagacttagaaagggttgtactttcggactttcttgataatacaccagtttttggattagacatattctcatgagttggacttgttgaatcacaggcagttacggtcgctgttgttaaagctaatgatacaacagtaaaaaatagtctctttttcttcattacttcattcctcgtattcttttattagttattctaaaaacctataagaggttcctcgttgttaacaacgctatcaatcaataaaagttacacctgtaattcacaagatggcattgagttaccttcccgttgctgaacaaaagcagccgatcaggttgatcgactgctgtctgaggtttattgagctaccgtatacttttagtgtaacaaatgacgactgatatcatttgatacttcagtatcatcgaaaaccgaaatgcttttcaacttccaataacatctgatctttattggactgagatgttctcataaaccattttaattgatactgctctgcttgttgcaggtaatgattcgatgctcgaaccaccgtgtttaatgtttcgtcccgtgcacgttgtggatctgataaattagggaacacatcctccatgcctctcagatgatctcgatccagatactccgctcgaattaggtcatcttctgcaaacatataaacaacgcggttggggttaacaatctcccttagataagcaggttccataaaagtatctactacgattggcttctctttccccatctgtaacaaatccaaaataataaactcaacactttcatcaaacactgaattcaaccagtgacttctatcgttcccacgccctaaaaagaaccattcccaatcaatgaagtgtcgcaaaattgctggatgatcctgcggattagccattttttgataatcgaaagtgtggtcatctgaggaataataattcagatcccattttgaagaaagtaactttgtcatcgtgcttttgccgccacaagggcctccacatatccaataaacgtgatctaaatattgtcttaatagtcggtctgaaattttcattatataaatatcccccttgtctaagattatttctcaaaagggagcacgtctattcttgtttgcactaaatgtccaggtcgctggcattgctacaccgcctttccgagcttaatttctgataaatttattcctcggaatcgcttttcaaaatcacaactaatgatctgtatactgccaagcgtgaatcggtgtacctttagtgacttcacctgtcaccgtattgatttctagtggctctaccaaaaccttccatccattttcgcttttgaaaattttatacgggagtggtggtgactgttcgtagtcttgtcctgcatacttttgaactacataaagttgaacttcatccgtgttgatttgtctggtttccacaatttcataccctgtagttggattggttttaaaatccttcacatatccttcttcacgacttttctcatccaaataatttgtatctttagaatagaacatcattccttctacatccctagcaatgtaagcctgaaagtactccgttgctgcttccatcggagtttgggctacgactctttccgcagtagtagtcgatgctaataaaatagaaccagcaacaacaccagcaagtaaaagcgatactattctttttcctttcatggattgaggactcctttttagtgatagagttggtaatagcgatcaaactttctttagatctatttagtataacgcattgaattattggaaaatttttatatttatgagaaatttgtttacatctatctttcagcttctttatccaaactcttctttacgcccacctcacttaatgttagattttataacataccattatgaaagcgagtgggttgaagatggatctgcaacatttattgactatccccattctctccaaagcaaaagtaattgccggacaccgcggactagatcgcttggtgcaatcgattaatattatggatgcgccagatattgtgcaattcctgaagccgggagatatgctgctgacgaacggctatatcctgaaagaccgccccgatgctcatcttggattcattacagacatgcatgcgattggttgtgcggcgcttgctgtcaagactcagcgtttctctcttgagttatctccgcaactgcttgagacggccgacaagctgggcttcccaatcatcgagctgtctgagatagacaatacactcggtgaaatatttcaacattcgatcagtgccatccttcagaacaaaacccatgagctacattacgccttgtctattcacaagcaattttccacgatggtgatgcagggaaaaggcataccatccatcgtagatacgttgtctcaactgctatcctcacctgtgctgctgcttggttcgaagaagcagattacagcaagctcccattatgcacaacagatggatgaccagtctctcgccgcgcccatactgacatttatagatgagcacccttccttccacaccgcaatctcgatctgcctacttactgctgataaatatcgacacaccgagcttcatccgatcttcacagatcggcacgagggttatttgatcgcactatatgacagttccgcaacctccaagctgtccactctggcactggagcaagccgtcaatgtgatcggcctggagttaaccaagaagcaagccgtaaaggaacgctcccgccgttacaaaaatgaatatttctccgatctcattcaaggcttcattcgttcggaacaagaagcgctgcaccgcggcaaaaaatatgggctgcaagccaaaggaagttctgttctcatggttgccaaaaaggatgaatccttagcgggcatacctaagcagaactctacttcctccggggaagagcggttcatctcggaacgagacgctaattacgagttgattaagcaggagttcgccaaattggatctctcctttgtcatgttcactaagaacgaccagttcggcatactcgtctttttggccgaatcgtcttgggacgaacacaccgttgttcagcagcttgagcggatggcgagcaatctgtatacagagtcgcagctcagcctatccttcggcataggtaattcctacaccaatgtattggatattggactctcctataaagaagcagtcaaggcgctccaatccggttatcagatgcgaaagacacgcttcgctcattcctatcaaaccatggatataagccgtctgctgcgcatgattccccacgatgagatgctgcagttccatcacgaaacctttaaggccttcgctgaccgagatccaaatgagcgtaacgagcttatgaaaaccttgtcctccttctatgagaatcattgccagatcgttgatacggcgaaagagctgttcgtacatcgcaatacagtgatctataggttggaaaaatgcgagaaactgaccggcaggaacattaaggacccgatggagagcctgcgcttccgacttgccttcgcgcttgagtcccttttgaatgttaatccagctcctagtgaagctaatcatacgtcttaaaccgagaatgtgtcatgtataatgacacgttcttttgttttcttttcatattcgattcatgttcaatcttcatttgtgcattttaactgatttaattctatttttatgttcagagtaactaatgacaatgatgcaaacagtctatatgattaggaatatattcattaatgtcatgttaattaacatcaatttacatcaagaaacgaactaccatcaggctgtaggaaaggggctacctatcatggctatacagatacaaggcgtatccaaatcatttgtcagtgcaaccggagaagatatccaggtcctggctgaggtttcgatgcaaatcaagaaacaggagttcttcagtatcgtgggaccgagcggctgcggcaaaagtacgatttttaatattatcgcgggtctgcttaagccaacaaatggcaaggttatcgtctgtggcgaagagatcgatcagaccaccgggcatgtcggttatatgatgcagaaggacctgttacttccttggagaagcatcctggacaatgtcacgttaggcttggaagtgaaggggatgtccaaaaaggatcgcagcgatattgccatggattatctggatcgatatggcctggcttcattcgcaggagcctatccctccacactatcaggcggtatgcgccaacgtgtagccctcatacgtaccctcgttacccagcctgatattatattactggacgaacccttctccgcacttgattatcagaccagactcattctggaagatgaaatcttatccattctcaaatccgagggcaaaacaggcgtcctgatcacgcatgacattgaggaagcgatcgccatctccgaccgtattgccgtcatgagtaaaagaccaacgaccgtgaagcaggtgtatgacattggtctcgcctcgcaatacggttcagcactgaaagcccgctccgaccacaagttcaagcagtattttgaatcgatctggtcagagcttgatatccaaatggggaggatcagctaatgaagagcacatcacctgaaattacccttgccgggaagcctgctggagttgcgaagagcaaacgcagacagtccaccttctccaaagaatggctgatgacgatgctgtggcggttcattattgtagcggtcatcctagtgatctgggaatccgccgttcgtctgaaactcgtgaacggattcctcatgggttcaccaagcgccattcttgatgccgccatcaccatggccagctcagggcaactgcttacagacgcgtttgcaacggtgaatgccaccgttatcggattcgtagcaggaagcttaatcggctcattggcaggactgctcatgtggtattccaagtccgttgcccgtgtgctcgatccattcattgtagcgatgaacggtattccaaagatcgcactcgctcccatgattatcatctggtttggttcaggcatcttctccaagattgctttggcctccgtagcaacattcatcgttgcgctattatccgcttaccaagcgacgcatcaaatcgacgaatcccagattaatctgatgaaatccttcggtgcgaagaaatcacaaattttccgcaaaattatcgttccttcctctctgccatggattatctcagccttccggatcaatatcggtttggcactggtgtctgttgtaggcggagaattcatctcttctgacaaagggctcggacacatggtattcgtcgaaggcaacctgtttaacttacccgccgtatgggtcggtgtgttcatgctcatgctggtcgcgatgctcctctacacctgtgtcggttatctcgaatcccgtcttcttccatggaatgacaacaagaacagcagcaaaaccacatctgtatagctgacctacaacgattaaaggggactgatgactaatgcgtacattcaaaaagatagctattctagcagcgatgacacttctattgactacactgctcagcgggtgtggcagcaatgccacaacacctgctaacggcgcaggtgcatctaatagcgaggggcaagcaaatacacaggtggacaaaattatggtgtccgaggtgtatcacaacctgctctaccttcctctgtatgtagcgaataaccaaggattcctagaggagaatcgcattgagctatcttccatccgtgctgccggaagtggaccaacagcattgtcttcggtgatctcaggcgagtctgcgttctccttccacggtcctgagcatgtcgcatttgctaatgcaaagggcggagatgctcgctcactggtccttctatccggcagtgctccagtatgggcagttgcgcgagaaggagtaaccgtgaactcgacagcggatttcaaaggtaaaaccatcgttgtgggtttggcacctacaagctcgaacagcttactgcggaaactattcgctgacaataacatcgatatcgacaaggatgtgacgatcactgaggttcagaatggctccgagcttggtgctgtattagccggcaaagccgatattgctatcgtttacgagccgcagctggatcaaggcattgcagaagggctgcatattgtccatgatttcacgaaggattatcctgactttgcctttgcaacgatgaatacaactgcaagcttcattgagaaaaatcctgatctcacccagcgctttgtcacctctattgagcaagctctggaatatattcaatcgaatcctgaaggcgccaaagctgtcgctgtgaaggaattcccgaatctggataaaaacgtcgtggagcaagcggtacaacgcatgatcgacagcaaggtatatcctgcggagggactcatcaatgaatcagcattcgagaccgcaatcgatatgcagcgcttcatcggtaatctgaaggaagatctcgcttacgaggatattatcgattcaagcttcaccaaatagagagagaaaggttgattactctgaaccaggacgactatctcacacaccgcctcacggaaagtgcgaaatatgcgaatggagttattactagcgaggagcttgccctatttacagcagacttggagctgattcgaaacttcaagttgccagaagaagtagggcccaatcccccgcataggagcgtgcctcttcgatgattaccaaaccacttaacgagctgacgattggtgaagccgcgacactgattaaaaataagttgatatctcctgtcgagcttacaaaatcctatttgaatcgcattgagaaagtagagcctgctgtgcaagccttcgttacggtcaccgccgaacaggctttgcaggccgcaagaaagtctgaacaacaactgatgaatgacgaatatctcggtcctctgcacggcattccctatggagccaaagacattatccataccgctggcatacgcacctcggccggatcaagtacctttcctgacttcgtacccggaacgaatgcaactgtgattaataagttgcatgctgcaggcgctatcctgctcggcaagacaacaacgacggaatacgcctttcagggaggagaacccccaacacgcaacccgtggaatctagaacatacaccaggaggttccagctccggctctgccgctgcagtagcggccggcatggcttccttcacactcggaacacagacctttggatctctgcttagacccgcagcttacaacggattaacctgtatgaaacccacttacggcagggttagccgtaatggtgtcatcacagccagttggagcctggatcatattggcgccttcactcgatctgcacaagataacgcaatcgttctggaagcaatggccgggcaagatgagctggactccttcacgcttccttatggcaagccagacttaacaagtgctcttgagcatcctatatcaggaatgatggtcgggctaccgagcagcttcttccagactgatgaaccggcgatcttgttagcagtggagtcggcaatcgctgtgcttgagaagctgggcatgcaatggaagaaagttgacctgccttcttatatggaagaaaccattgctgctcatcgtacggtaatgcgggcagaagctgccgccttccatcaggaacgcttcgcggaagcctctgatcgttacggccacacgatgcgggagcagcttgaactcggttaccagacaagtgccgttgattatttgcaggcacaacgcatccgaacgatattccggagcgagatgatgatgctttttgatgaagtagatgtgttattgactccatcaacaccctatgtggccccatatggctacaagacggggagcccgatttttaacggaccgtttactaatacaggactaccttccatcaccgttcccatcgggtttgataccacctcagggaagccattgcctatcggcatgcagcttgctggtccactcatgcgagaagacagcttgttatccatcactcatcattatcaacaggctacgaactggcatcagttaacaccaaatatacacactcattaggaaaggaatgacagctacgatgtctaccatcatacatgcaagtgcagcacccaagttcccgcttcctttctcccatgctgtccgcgcaggagatttggtctacgtagcaggtcaggtaggtgtcgatccacagacgcttgagcctatcggcggcattaaggagcagacggagcagtgcattcgtaatattgaggtgatccttcaagaagccggacttacactcgatcatattgtgaaggtaaccactcatctggcccgagtcgaggatcagcccgaatacaacgaagtgtatgcgcgaatgattaaacaaccctatcccgcccgtattaccgtatttagcgggttaggcccttatttaattgaaatggaagtgctagcgtatgcaccttccattcgaggagagtaacacatcaccaaagagcacctgtagccatagatgggtacaagtgctctttttgtctagaaacccggttctcttttgagaaacgggtttcttttcgtattcctattttgttttgaagcgagatgcttcttcggcaagttgtttggtcagtccatcgattctctgcaccatatccatcaaatgttccgtcatgccggactgctcctgcatggttgctgtgacttcctcaacagaagccgacacctcttcaccggaagcagacaagttctgtgcagctccaatgacgtcatccttatctcgttcaatggattcgatctccgtggcaatagcctgaacctggctcatcatctcattcatattctcagtgacaaaattgaatgtctccttcgtctggctaacgctgctcttatgctgttccgcaatcgcttcaatagcctgaacacttcggttattctgctccacgtgatcaatggtctgcatcacgattcggttgatatcctccgattgagctgtcgtctgctctgccagcttacgaatctcagaagcaactacggcaaagccgcgcccttgctcacctgctcttgcggcctcaatcgaagcattcaacgcaagtaatttcgtctgatttgcgatttcggcaatagtacctgtaatctggtgaatgcccgaggagctttcggcgagttgcactgtaattttggagatgttaccaacttcaatctcgttctgtccgttcaccgcaatgagtgcatcaataacttcatgattatttttgaatgcatccgtaatttcatctgccttgaacttcactgcctgcgacattccattcacgttggcaatcttgttaccaacattcatgaatttgtccacaatggcttccgtatcgttcgcctgggactccatcgctcgtgaaatctcaaatgctgttgtcgttgtttcggcaatcgtggtcgaagtttgctgagtggactgttccagctcggatgtacttgttttcaggatgccgatggaatggttcatgctggagatcagctgtttattacctgctgccatggtattgaagctgtccaccaattgtttgaattctccgctatatttaccttgagcctgcaccgtcagatcgccgtcagcaagctgtctgaacaacacagttagtcttgtaattggtctggttaccagcaaagagatcagaatacccgctacgacggaaaccgcaatagcactaaacagaacaatatacatctgttttgccatcgcacgcaaaggcttctgcacatcgctcagtttatcttcaacaacgacggtccaatcggatcttggtattttggagtaatacgccactttctcatctgtgctaatatccccttgctgtagttcagcgccaggagcaagatctatcaatgattggtattcgccggactccatcttctggccggccaacttctcatccgctgaatcgtagatgaccgtacctacacggtccagaatgatcacttttccctcatcattaatattgatattttgtagctgattaacgaagaacgaggtggatgctgcagatacgagcactccctgtacttcttgattctcattgtagattggcatggcaaaagccgtacctagttgtcctgaggacttggctacaatcccttcactaatcacgtttttaccctgaatcgcttcttggaaatatgcccgatctccgcgttccgccttgataactgccggatcattcgctgcaataataatgccattccgatccaacaaaatcagactgttgttaccttccatacctgccagactgtccgcgagaataccactcgccttatccagcagctcattgttttccgagaagaagttctcaccttcctgtccattcgtattccgaatctccagcaaatcctggaaggtccgatgtgttgtgatcaaaaaggtggatttttcttccaaacttagtgaagcatacagacctgcccccacccggtccgaggttgctttaatctcatctttgcttttgtcgagtgtgatgacagccgctacagtgtaggatactactgcagttaccgccagtacgatacacaccagcagactgatcataagtggcagtttgactctgaacgacatgttgcgcatgcgttctcttgccttgctaaataccatgattacattcaccatccattttcattttcatcattatgaagtccaaattctatgtatctactttatatcggtcgatatcaaataatctgtaagctgtttcgccagttatactaggtcaaaggccactgcaaacgattggaaaatgaagactttgggttaatacaaaatataacatcaacatcgtataatatataaaatacatatcgtgcaggaagagggacaacgcattgaatccgaaaatgcctactttattaaaagtcgaataggagaagtgatatggcaaaaacagcattacctacgctattaaatgtcgtgcgtattttattgagtgtgaaactgatctacgtgattgtgtcctttatcgtgttcctcattgacttcaaccagaacatggaggcctatctgggtttcttacgtaaaggagatgatctggcttacgcctctggcgtaatcttagccagaatgttgtttatcatcggtcccagcctgctcgctgttatattcatcaccaaaagaaagttcaagctcaccgtgacgtttctgagtctggcgctattcgtttccattccaaatgagagtaacctgttcaccctgattcatctctttgccctgcttatcgtgctcttgcatcgtccaagcaagttgtatctgaaacgaaaggatatccctgtcaatgaagccgtagttgaaccgaagaattaattccaaaaggggatcacatgacattgaagcctagaaaaaaagggagagcgcacaagatatgatgtcataataaaaaaacaaggacgttccttagtattaaagaaaggtccttgtttaatgtgactcattatacaaagtgattgtgagatttacaattacagtgcagcttgataaatttgtattacatcttcacgctgcaagtttttgaagaatccgaacggaccaaatcgcatagctttatcagccattacatcaatctgactgtcgtcgatgtcatagtccgccagacggctaggggcaccaatcgaagtccagaatgtacgcagcgcttcaatgccttcttcagcaacttgtttgtccgactttccagtaggattaatatcaaatacattaatggccatacgtttgaatcgatctacatccacatccagattatgcttcatccagtgtgggaaaaggattgcaagacctcccccatgaggaatgtcatacacagccgatacggcatgttctatattgtgagaagcccaatctccggcaagacccatattcaggacatcgttaagcgccattgttccgcagtagagaatggtttcacgcagttcatagttttctggatctttaatcagacgaggggccgtatcaatgacggtacgaagaatcgtctcacagaatccaagctgaactggtgtattcgtatccagatggaaataatgttcaaacacatgagacatcatgtccaccatgccgtatacagtctgatccagtggtacggtgtatgtgtactccggatcaaggatggagaacgccgggaaagaatactcgctgaaccatgcccatttttcctgcgtgtcctgattggttattactgaaccgttgttcatctcggagcctgtcgctgccatcgttagaattgtacccagtggaagtccgccttccggggttgcttcgcgcacaacaacatcccacatgtctccatcgtatttggctcctactgcgatggctttcccgcagtcaagtacactgccgccgccaaccgcaagaaccagatcaatgttatgtgttctgcatagttctacacccttatgaaccgtagacagacgagggttcggttccacaccagccagttccgtaacctctgctccgatttcattcaactggctgattacctgatcgtacagcccgctacgtttgatgcttccaccaccatatacaagcaaaatacgatttccgtattttggaatttcggtttgtagtgcttgaagttgccctttgccaaaaatcagccgggtcggattataaaactgaaaagatctcataacgtatgttcctccaaagaaatctgaaattttgtgcatccatcattatagttctctttattcgtaaaaacaaatacaggcaagaaggagataatagatgagtatggagtctgtcatggctaaacactgttttcctggacaaaaaagctcctgccagcaaagtggcaggagcttacatcacagggattcaatataaccatcgcatgcttccataacatgcatggtctacatctcctcagatattaagaattcggtacttaggttctaacccagatcggcaatccgctgttcaatacgcggaaacagcccaaaggcattctcatagaagactttatcatgatgctgttccggtacaagtcgacggacaaattcggcatacagatcgatgggcgcaagcggccagtcggtgccaaacagcattttctcgtaatgatccgaatagaccaaggcccggcggaaatgatccatgaataaaggttcgttcatgaaccgttcaaaatggggccgatcccccaccacaagaccagacaaatccgcatacacgttaggattctttgccaccacttcagctgcatccatcacccagggatcacccagatggcagatcatgaagttcacaccgcgttgctgcaaggctaattcatccaccgtcaacggatgcgaatatttgagcaatccattcatggagtacgtgtcacccgtatgaatcacgacaggtaggttgtacttggctgcgagttcatagaccggggtatagattttgtcatacacatagtgatgatagtatccggcatagagtttgattccggctacttcaggggattgcagtcttgcttcaatccgatcaagctcgtcctgagcgtttttaccatctagcgcattgggattgatccccacacattccatgaggaatgatgggaccttctcttccagatcaagtcccatcgggttaggggaactggaatccgggaacgctcccttcgtctgctccgtaacccccattccgatacccataatgacgtcgtttttatcaaactccgctttaagacctgctgcagagtaatccactttcgacagatcgatcgccgttcggtgaaagctgtcgatgtccgacagatgaatgtgaatatcaatgatcggcatgtgaagcctccttttcatcggtagaagttacaaaattcagtttgagaaggtcatgcacatccgctgaactcagcgggatctgtcccagaaccagatatgtcggctccgtccagaccgtctccccctgctggagtgtcatatgatgatgtacgttcagacccgtcacctgattattggcaaacccccacgcactctgattcgggtaacgatggaccgcatgcagcatgttttcacgcgaaaccgatcctactcgcaaaagatcttcaagtggcaggcccacatccaccttgcccagcgggaatcgatctttacccggttgttctatccaaccttccgcaaatacagatgaaggctggaggaaacgttcctccgcaagcgagtaatccgtcagcgtcaggccactttcgtttgtcacggcaagcagcgtgcatagcaaaggaacacccgggagcatcagataatgctggtggatcgtgattccccgattcgcttcatgcttctcaatccgggtggtcagctttatacccttccagacgttgccgtattgatccttctgctctgtccaggaagcggctctttgttccaactggcggctgaaaccattcatgcctggaaccccaacacccagtccgccgtaccacggattccaccacgagcgtggagcgggttcagggtatgagctatccagccattcttctcctgcatatttcagagagtgtactacactcccgaattcaggagcaacagcgatcgacaacactccattgtctacagtgtacacaggtccagatgaaccttcttcaatcttctgcttcacctctgttccgctctgtgggaaccaaagagcatttcgctcctgaatccgatcttcaccccgatatagcccacgaactttccaaccactcacgtgctggtctcggtccgcttcgtctggtgagaatgtcagcttggctgagtttagattctgctccggattgaattccttggcattggccataacctccggtttgccaccctgctgcacatacagctccagcttgcccgcaagcggaaccagcttgtgttcagtcaacgttgcttgcagcacgtccggggcaaatggattcccctcactcagtgtcagatccagatggctgtccagcaacggaatgacagggttccgctgcttccgtgcaaacgcacggaaatccgaccatttggcaaacgtgttcagggcatatacagttgcttttgtccgcataacggtccctgcgggaatacggccaagctcatgctgaaaccccagcgtgtattccggacgaagcagcttcagagaagggtcccagtagataccgctggcaccatactcctccttacagaacagccagttctccgtgatttgggcgctgtcccaatggctcggatcgccagcgtaagaatcccccatatccacgaagcgcccctgataaggaaggattaacctgctaccatagaacccaaagttgttcattagaaacaggtcttcttcccaagcggtatctcgtgtattttcaacctcatggtggaattcggcgattccattcgcagacagcttgaccacagacttgatctgcaagccagggaaatcctccgagtcatacagtgcttcaagaacctgacgttccccttcgggataaatattcacttcttttgcttgtttcttggataactcttcggcaaacggcttacccagcttcggataagtccaccagaatgaatgacgggaaccgggatattcaatccacatgttattatcttgcttgctcatatgaatagagaatgcaccattaacagccacccattgatcctcaatctgcccgccatatttcccttctattcccttcatcagtacagaaattttgcttgtaaaagagatcccatggttccccgctgggacagccgtcacttctacttcttgggaatagagaccatacgaacgcaaggtgaaaagcactggcacagacattttacctttggctggcaccgtaaagcgcaccgaacgctccgcccattcaaggaattcatcctctggcaggtccaagctgaactccgtttcggcatccacattattttccacgttcagaaccaactccgccgggatgcctggatagagttccttcataggcaagatggtcttgatcttggccgggaatttcggggcaatacctaacctgaactccgctttcttaccgccgatcaaccatgtgctggcaaccacgggatgcgtcttattgttattctgttcctctgtaattggatcaaggtgaaactcaccttccacgatgatggtttctcccggagccactgctcgtgcaacgtccagcgcaaatcgaatgtttttgttatcctcacccttgatctcaactgccaactcggacgcagaagtgttcttaatgcgatagcgaacgttatagctggaaccgaaaaccagatcatgatcatcgacttctgttgagatttcgtaatctggtgtttcgagggcagtcagcccgcgacccgacttttcaaattcagcccgcagggagacatctccctttttccacgtgtagtcaaagaaatcaaaaccacgttcccgtcggccatccggctcggtgacgagttcacgcgtgctgtctgcataccaatccaactcctcgaaataaggagcaaatacttcggtctgcaaaatggtagggatgaaattcatcagatgcacattatcatcttttttctcccagaagaatccacatttcttgtacatcggtacagccttcgtattccctgcccatgtgaacagatccaggcggggccatccggcctccacggtcttgcgcacagcattcaggatcaggttacgtccaaccttataaccgtgatagtcggggcgtacgttaagcagcggtacatatagcgctctctcgtcatagcggtaatgagcaaaactgcagaagccaacaacctctttctcatgaacggctagaaacacataaagattggacgaactctccatctcccggcgaactgtttcctctgttctaaggttggtgccacctccccagctttcattactacggttccacatatcagcgagtgcggcagcgtaagagggatcgtattcaataatatggatttgatcaataatcgaagttactgtcatatttggatctccttatctttatctataggatggtctttgtgaactttcgatatggcctttgcccgatagccgcagagataatacaggccatgtttgaagaagctagcgatagtcttatcatactataaatggaagcattttcagagaattaaaaatctttctttccaacttatatgtgcctttcggaagctcttgttagaagcgtcaaggatggacgaatctatttaggcatgaaagaaaaaatccacgtcttttagttagacgtggatttaggaatatgatcagctactaattttcaattatgccaatatagaacggacattgcgtagaactgatttcataaattcagaggttggatcggcatgccccgcaatttggatacgtcgttgccgcacatcaagactcttcaactgatccgtcaaaacaacacctgaaaatggcagctcttctggtagtgtaacttcaaaaggataatccttggcttggctcattatgggacatacaacggcaaaacccgttatttcattgaattcaagttccgatagaacaatagccggtcgtctcccggcttgctcgtgaccctcttgaggatcaaagtcaagccatatcagatcgcctcgtttgggaataatcaaagtaactcgttcccttcagtaccaaagtctatttcttcatgtcttgtatcctgtttcactttagagagcaaagtctttagatggttacgtagttcctcattggactctacaggcttggtttttggacgcaacaacaattcattatcttctgtcaccaaaatctcgatttccgagccttcttccagattaagacgcttaagcaattggttaggaatgcgaattgcactgctatttccccatttgctaagtgtggctgtagtcatggcaatcccacgcctttcgtttgattgatgctccaattatacctcacctccctacagttgtatatctatatgatatacatgaaacaataaaaggatacattgtattcaaccataaaataatgattgtacagcctatgattatgaatagatataccattggtataaagcaaaataagcatataaaaaaacctcatttggtcgaaacgaggttttccagtcagatcatccccaacaatgaaaaacagctgcaagccttagacgaaaaaaatgaagtccagactgccagttcggacgcagaagtgttcttaatgcgatagcgaaccttatagctggaaccgaaaaccagatcatgatcatcgacctctgttgagatttcgtaatccggtgtttcgagggcagtcagcccgcgacccgacttttcaaatgcagcccgcagggagacatctccctttttccacgtatagtcaaagaaatcaaaaccacactcccgtcggccatccggcctccacggtcttgcgcacagcagcgtaagagggggcgtattcaatgcttcgttatccacttctgtatgaagtgtcaatccatgcaacccttatgtatgggtaaacatattgccgcagtgtgacctgaaaaggcctttcatgtgaactttgacaagctctattcgctattgttactctttgtacaggagtgtttcttttatatataaaaaagatagattcatggagggaaagcatgacagaatggatcacgcaatttatactcttttttaaagatttgtcatacgcaggtctggtcattgccttgtcgtttgaattcgtacctgctgaacttgtactgcccatggcgggatattgggtgtatcttggggatatgaagctttggctggctatactcgctggtaccgtaggtggaacgtttggacctctgacgttgtatgccctgggacgatatggcggcagaccgatggtcgaaaaattcggcaagtatttcttgattcgcccccaccatctggacgcttccgataagttcttcgagaaatatggcagcggggtagctttctatggacgttttgtacccggtattcggaccgtgatctccatcccatgtggaatggcgaaaatgaatgtgtttaaattcagtatctttaccttcttggccatgcttccgatcacctcattgtacatctacttaggcttcaaattaggctctcaatgggagcacgtggacgagattgttaagccttatatcgttccggcagcggtggttttcttaggtgcttttggattttacgtgcttttgaaacgttggaaaagaagaacggctttgaacaagtcataggtttgcctgaggtaaagaaaagagatgggaagtcagaggtgcttgttactcattgacggactggtgagaatacatgtaaagccccgcgatcgtgaggatcagcggggcttttgtttaggaaaaaaagaagaacccactatatgcggattccttttttagccatcatagacttaaaatcttgatttactttatttatatgtttttcgtaacctaccgtaccgaggtcacccctgtacgcctcacgtatccttttcatttcaagctctatagaatgctcggcgcctatcggtggtggaacgatcattacgccatctgacatacttcaccctcccaatatttctatatcagttcctgccttcttttcaaatacacatacaatactactcccgatgccgcacagatcacagcacataaaccaatgaatccatatcccgcctgaagcccgcgcagcagccccaactgagttgttgaaccgtacagattcttcacaccctcaatcacccagccaatcacatagttaccaatgacactaccaacccccatcaaggtaaccgtgaacgtaatcgcggtgtcactgccgtttggatatctgcgtgcgataaacgccataactgttggatagatcattgctatgcccgcgccagatattgcaaagaaaatcgcaagacgctctccccctgcaagcgccacgaacgtacatactcccgagaaagccgagaacataatcagcgacaatacaaatccgatccggtccgtcaatggtccaagcagcagtcgtcccagcgagaacgtgaggaagaacgcagataataacccggaggctttgaccgtgtcccacgtgtaggctttttccaggaaattaaccaaccaacccccaaccgccagctccgataccacgccaaaagaaagaatgagcaccatcagccaaagggcaggatcacgtgttaacgtcttcagtgaagtccgatcttcatgaggaagatcgtcccccgggaatttgctgcgcagcgccgcaatgatcggcagcagacagagtgacaacatcaccagatacatgccgcgccagtccagttcgtgaccaaacacgctcaacgacatgacacccgtcgctagcaaaggagccaccgttgaactcagtccatagaagaaatgggacaggttcatcatcgtacctgtgtttttcacaaagatccgcgcacccagaatcgccaaagcaatctccagcatgccgttaccgatgtacatgaagaagtatgatgaagcaaagagtggataagtatgagacacataaatgaacacacccgagaggatcatcgatgcaaacgaaatgatgctaaccgccttgatgccccatttgcgaaccagaatagctgtgaaggagcaggcgatcaggtaacccagtgcgttcagggataataacgtcccgagttgtttctcatccagattaaaatcgaattgaatgcgcggaatggccggccccttaatattttccgatatcccgaatacgataaatccaagaaagatcgttgccagctgcatggcgtacagcttgttgaactttcgtttgttcccttgcgtacctgcttgctgattcaaaataagttcctccattgcgtacagaaaaatgattgcacgttataactacgattgcagtaccatcttccaaccgctgttatccctgtatttttttgatttgttcctaaaggtgaaaatacagtgataaaggcgttcttcagatcggttctgtaatctccgttatcgtgtaaaatattttgcttaacttcataaaagtagttgcttaccattgcttctcaataacctgaatgcggtaggtcaggctctccagcgtcaccgcgaccagcccagtcacatattcactccgagtgtctctttggatgatcaactccggcatatgctccaatggaatcattcgatccagacaaccgttcgtcagtccatccctcatagccgggtccatcgtatcccctgtaaccacaatcgtagccgggttaatgatcgcgatgatggataccagcgtctgtacgaccagttcctgcaacccttccaccgttttcaacattcgcaactgctcttctcgtgacacgccaaaaggtaagaaggacacctcgcccccaaattgcgtattcccggtcagcggacgaccatcaatgataaagcctgcacccggaaaatggttctctggaaaagtcaccaccgcaaagttcttctcttcctcaaattgctgctggttatacagtccgtagaccgtcaggttcatgtcgttgccaatgaccacttccacgtcttcatactgctccttaagccttggcccgagtggctgatacatcagcttcggtacgtcgcaaatcccaataacgccgttgtgcgccaccccaggtatgccgatcccaatcgcctgaacattgtggtgtttttcgatcagatttgcaatcagctcctctaccaccgttacattaatctcatccaaaaagagtgtctgttcgtccgccatttccccgttcagattggcatatgtatgtgtgatcgagtgaatgccaccctctgtccgaataatcaggcacagcacactcgcgtagtccgcattgaattgataccgactcgcaggtcttcccccgctcgattcatccgggcccagatcgataatctcaccagtttggagtaattcgttcaggatcgtgccgcatgtcgctacgctgagtttggttaggttcgcaatggaagccttggtgcctacgcccatggatcggagcgtgttcttcaccagttcaacgttgatccgcttcacctgttgggtgttgtgtgatgtaggtaacatcgttagttatatgcctcctttcgttcatttcgaactattcaatgaaagtttttaaaagtgttttaataattgaagtgtagggggatttgggaggaaagtcaatgcttaattgaaggagaaaaacgtttggatggaaaggcaaaaggacagttcaagatcaccatatatgatcctgcgctgtcctttagttaaggtgattttatgtagactgactcatttgatttgctaagatgcttttctccagtcggactctaaataactttcggttcagatcctgttccatggaatgcaggtgatatgcagcctgtttcaccgtgtccatatgcagcacccctgcccgcttggcgatgatgtccatggcgtccaatatgagtttgttgcatgtaacgagttgatcaacgtaatcgtcttcttgtcggactagttgtgcgtaccgggaagacaggtcttcgctgttggtacttgtcatgttaccctctccttttttaaggagagggtaacatatcactagaaaagatgtggtacgtgagaacgtaccattgtattcctattcgcatctttgtttattaacagtaatcatctatttgactgaatttatagtaatctttaagttttgcctgctacacatgcggctttatgaagtattattattatagatttccaacataaaaatcattaattcaattttttatataaatatgtgaaccatttctagaagttccaccatctaattattggaaagaacataaatttagattggaggttagctttatgaataaaaaattagttttttcaacagtcatactctctttaatggcaggaggaatgatttactcaggtacacttgatcaagggaattcagggtcagtcgttaatggggatgctcagacttcaggacctattaataatcaagaaacggatgaaaagaaaaccttcaaaggtcaactagaggtatttcccttcgaggatggggttaaacaagcagatttaattgtcaaagtagtattacgtgaaaaccttggtgaacttaccgaacccgtgcctaaaagtatatttaatgctcaaattctaagtacacaaaaaagtgaccctacactagtatcagaaactattagtatcatgcaacaaggtaatagtgaagtcttgtttaatgataatccgttattccaagaaaatgaagaatatattctattcttgaaaaaagctgttggttctgtggcagaagaatatccaaacctttattggatactgggtgaagagactaatatgtataaaaatattagaaataacactgttgaaaaattagggtatattgacaaagaactttatgatgttgagaacaaccatactttaaatctcaatgaaacgactaagactcaagtgctcaacgaagaagaattcattaagaaaatagaatcagtaactaaatagttattaacaaagagaaagaaatggggtatagattatgagaaaattcctagtgaaattgtaagcatactgaggtctttccataaacataaaaagatagttaagcggcggccttggtcctgaattcatcagggctgaggtcttttatgtccaacctgagatggagaacaaattcaatctggcgtacgatttgaatcaatgacgagtcacgtaagatagaattatgagtttatgaataatagttacatcaagacattgaaccagaggagacatatcctatgaacaaaatgaaaaaaacaggtttgtggcttggcgttacgactcgttctttattttccaacatggacgccaaaaataaaaggtacaaaccctattcatgtattggaacaagttaaaatcaacggtacgggacatgaaatcatgatcagaggacgggatctggaaaacccagttatcctttatttacacggcggaccgggtgcatctgaacttccgtacgcgaaaaagtaccaagatttattagaatctcagtttacgattgtgaactatgatcagagagcaatcggcaaatcctatcattttttcgaggactattccaatctctcagctgatgtgctggttgaggatgcactggccgtcacggattatattactcaacgtctggggaagaaaacggtgatcctgatgggtcattcgtacggaacatacataggaactcttgctgcgcatcgagcacccaataaatatgaagcctacattgggatcgggcagatggcagatacacaactgagcgagatagacggatggaattacgttatggagcaagcccaactggccgataatcatgaagacataaaccagttggagcagatctatgaaccgatcaaacaaggacaggcattcacgccgcgagatatcgttaaacgttatgggggagcttcgaggttgatggacagccctgacaccagctttctgggaatgacgttcagccatgaatataatatgctggatgccattcgttataataaagggatcagttattcgcaagaaatactgataagtgaagccatgagccgtcctttgccttccttgattacgaagctggacctccccttttattttgtcatgggagattacgactttatgacttcatcccatgccgccaaggtgttttttgaccagattgaaggcaatcagaaggaattcattgcctataagaactcggctcactatccacattatgaagagaagcaaaggttttttgattggatggtagatacctttaagcaaacaccttaatcattcaaccctttgccctccaggatcggctgcatgtatttctcgattcgtgacacttttgttttggattgcttcggttgtgagaaataatagagatatgcccgctgccgtccgggtgtcagtgcttcaaatgcatcttggaaagcaggattctcatcgaattgctgctgaagttcctcgggaacgctatattcggcagtttttttcatttctacttgcagtccggcttgttccacttcaatcgcttgctggatataggctttgatcatagcctcctgatccacaatctgctccagactggtgaagcgaagctggcgttctgcctgtacattctccgtttgctggaccaaaatgccgtgtgtatccttcagtagagcacctttgaagaatagaatggctacgtactctttgaatccatggattaaaacgatgttttttccatccagcatgtaacaaggatgcatccacttcatatcctctgtcagttcaaaatcccgaataatctctctcagctttgtggactcttccttccacgttttgagtttctttagatagccgtcaactttgcgattcccacttgtatccgtcatggagaaatacctctctttatctcatgttcttataggttcaattgtactggttttcagtggattgtacagcgttgcttacagagcttttattgacttttccacttgaatttaaaccttcatagcaacaaagaccctcctgttagatggcctataatttaatccaatcccatctaataagtttcaatcgacagttcaccatacccatagtaaaataatggaatgtctattgccataatttcaacatacgaaaggaagatttaaatgagagagtacacagttgttccaggtccgaaaaatgttcaagtaaaccgaggtgatactcaggctgctgttaatttatttgcggatatcatcaatcacaaagcacaatccggatggacctatcaatcgatggagtcgctagctgtcaccgagaagcccggttgtctccagcaacctgttacaacgcatcattatatgctgattttctacagagagatttaataatagtacaacaatcatgagaaactcagaatctgaggaactgatatataataacatgccatccgaagaagaacttattagactcttacatacacatcatgaagaaaacgatcctcgaagcagtttctatataagaactcatgttattccagaaattgattggttgaagtctttgcttaacgttacacttgcattattcgcaggtctaatcatctctatgatctgtttctatctcttgaatccattcattccagtatatgctttgctaagtgcccagattgttttcatagcaagtatgttcttcatcgttctacgacgtgttagagcaatcctgatatggagtattagaatttatcaacgttttgcccccattgaagtgaggaataaatgtcgttttgaaccaagctgttctgtgtatatgattcaagctattgagaaatacggggcgattaaaggtctttccttgggcattcatcgtcttcgcaaatgtaatatcaacggtggaggatatgattatccataaagccaaaaggtccatagacaatctatgggccttttggtttggttaacatctctggcttaagctaatatccagtagtgagaatgtctcattttccaacatggaggaagctatcatcatgaagtcttcagccccaatttcaaaatgccctttacgaaatggaaacccccaattgcgattcccgcgtgtaaaagtgagctggtctaacaacgtagcgatctttacttctcgacacggaagataacggagatctcggcgaaagggtataaaggattccgacatctgatattggtatatcctgtcatcggtaatttgaccaatagcggtaaaagcctgaagtggcttgcctgttgaaatgtctgtgcgtggagaatagtatatcagccagtcacccggggacatctgtcgcaacagtgctgacttgccatggcacaactgcgcaaaccctccctctacggctacatttacatgagaagcagatacaacaccaatccaatatctgctgtcctgatttggtttcatggatacatctcattcccttctctcgtttacatttccagattcgatttcaatcgatccaattgcaaaaaatgatgtctgtagtgcatctctatcaacaaaaaccactcctgagcatttagagcgccaagccttggatgacgtattttgttgtttacggacgcttggtatacaagaggttctgtactcctcatccggtccactacctcgtgaagcccatcgatcaaggatcccgtactctcgggtggttgcggggtgtactgcggggaagcagggactttaacaggcacgggagggaattgtcctaattcaaacacttgcctacccagttctgttttttcctcacccgagtttaacgtcgaatcctcgctgctcaaacactgctcaatattatgcagatgtaagaaaagcgctgattgaatcaaatgtacatacatctgtccaatggaccattccttttcactttgttttttaagtaagctacccatatccaatttgttcagttctgccaaatatcgttctactgccgtttcaaatgatttcaatacttccgctgtactgctcatccctcaacccactcctcttgatctgtgatatatcaaagtataaaaaaacactactgacaggtgtatgtcagtagtgttttaagatgtttttggctacttcctgcattcggaagcgcaaagactccggctccaagacctcgatatctccaccccagccaagtaaataatgcaatatttcctccgggtagcggacacgaaaatgaaaaatgacaccttcctcttgctcctcaaatgcatccatataaaaatgcagggcttccataactttgtcagcgacttcaggtttagccctaattaatactggttcgttacggtcgtcaggcggtcgataactgtttagatcaaaatccggcggcaaaaggaattgatcctccagcacggaaagttcagtcatgcgtgacaaacgaaaatgacgaatgtcttgtcgcatatcacaacgtgcaattaacacccaattctcctgaaccagtgagagtccatagggtgaaacctcacgcatgttataccgattgccatccgttcctggcatttttttcaggtacataaagctaattttacgttgttccaagatggcattacgtatctggttaaggtatgttttcacccgtgctcgggttaaaggttcaaccgtatgaagcagtcgcatcgtttcccgaacacgtattgattcattacgaacggattctggtaagattgcttcaattttgcgttgagccgacttagcctccatcgcgtattctgtatccaatctctgttcgataaaatcagctcccatgagcagggatacggcttcttctgcggtgaagcttaccggggggagaaaatatccttccatgagggaatacccatgacccggagcacccatgatcggaacgccagcttcgcttaatgcctgaatatctcgatatatcgtacgtacacttgtctcaaattgagcagctaaatcttctgctcttaacatctttcttcgctgcaattcaagcgtaatcgcaagttgccgctccgttttgttcattttctaagcccccaccgtttcatcatccaaacctaactcattctatcacagtaacttgccctttcgtttcgtgaattaaagctatggaacgtcttaaataccatccaagatgagatagtcttaatccaaaaaaactgataccccaaaaggatatcagtttttttatctactttatatctgctttatatctgctttatatacggttaattctcttcgttacctcttacacgtacatggccagcaacaagttgtagatcatcgtcgcagcttctgctcgagtcgtttcacttcctgcacgaaccgtatggtccgtatatccactcacaatcttggcctgcaccgctgcatccagtgcttcttgtgcccaagatggcgtctgcgatgcatcggtgaagtttggtttaacggatgtattaccagacattccggcttgttcatctaaacttactttcagcgcattcgccatcatgactgccatctcggcacgggtaatcgtccgatcaggcttaaatgtgttatcaccgtagccgttcacgattcccgcttgcacggctgcagcaatatcaccttttgcccagtctggcagactgccttgatctgcaaatgtcagatccgactccacggacttcaatgccagcgccttactgagcaacgtaacaaactctgcccgtgtgatcttcttcgatggttggaatgttccatctgtgtaaccttgaatcacgttcatgcccaacaaacgatctgcgtagtcggaaggccaatgtccattcaggtcagacagattcaccggtgtgtaactggacacaatgaatgtacccagatgattcacattggccgttatgcttcctgctgcattcatcttgccaccgataaatacccagctcttacgagcttcattataatagtagatcgcaggttgggtgccgttaggcagatctgccgaatccacattcaggctcaatgccgcctgatcattcaacgttcttccgccactgcggctgatctgtacagcttgtccaagtacattcagggaagctgtattctgcaacttgtccttggcaaccacagacacttgcagcgtatccttggaaccaatggctcccgatggaacattgaattgcacgatgtctttcagacccgtttggaccggctgattcgcttccacctgaaccttcacttcagtggatgaatctgaccctgtttccgggttcgttggtgtggttggaacggtaggcgttgttggcacactaggtgtacttcctccagaattcccacctgagttgcctccattacctccacctgaacccccgccaccattgcctgagcgagcttgtacagtcacggtacggataacttcctgtgccgcattaccagcgatatccttcacgttataccgaagggtgtagatccctgctgcttgtgtgttcaccgtgccatccacctgcacggaaccacggatgccgacattatcagaagcctgtgttccaggctcgttgtatgtgtctcccacattcagcgtcatctggctgctaccttgcagggtgatgacgggaatctcacggtctattttaatgaccagaggtaaagtatacgtttgttcaagatcgtctgttgctcggaataaaaggttgtgctctcccggctccgttacctccaaaggcgtattctctgtataaagttcgtacgtctgccctccatcacgagacaactcgataatcgcggaagtagcaggcgcgtatactgcgctggttacactaacggttacggactggttcgtccatgtatccgtgtgatacggctggccgtcagcggtagttaagttgctttttaacaccagcgcctgattattcgtgccttccacaatgacagagaacgttttgggttgtgactccgtgccacgttgcacggttgctttcagttccaattgctcattattatccggttgcgttagcagcttgccctcgttgttcattagttccgggttggagctggaccagctaatcgtagccccgtgtttcccttcaacaggaagggtaagatcggaatggaccgcgttcagatcacccagatcgattgcttgaagcgtatcggttaccgcctgtgcgtcactgtaggatgtggcactcatgaagattgggttggagtagaaccacagatcgcgatagttgctatcgttgatttgattaaaacgggtcgttgcatcagctgtcgtatttttcggatcaagctgtggttcaccatttacagtctcacctgtcacgttcatgcccagattcgtaccgcgcaggcggaaatacttgtcctggtctgtagctttgatcttgtacgtgatgacattatagccttcggcatctgtcgtccaatcgttggatgtgaaggtagccagtactttggtagagtcgttggtgtctttggtatatgcggctgtacccttctgggccttggctgtcacatccccggcgatgagatcgacgtgatctaccacgggtacttgtccagcggacgtgccgctgttgattggagtttcatagttgttgctcgtggttggactcttaaaacgaattttcaactctacttcatcgccttgggtcacattaaggtctccacccatctcaacctgagcacccgctccggaagccgtgaaatcgagtgcgttaatcaggtcaccgaatacagaaaatgatttccccgaacgcagtccatccagaacagcctgcatacctgtaccctcaacccaagaataagtcttggcatattcgcccggaaaataaccactggaattcgtaccaatcgtcttgaagtgataatccgaattgccatagttccagaagtgccgtccttctcccagcaatgcatcccatagtccgccaaccttggcgaccatatagtctacaccgccgtatgtacggtatttgtatccatcatctgcggtcggattagctacattgtagcttgtgttgtaccctccacgatccggttccatctggttacccagcatgccttcgataccaaataccacttgtggagccagatcgttgaactcccggaagtccgcgatggtatatttgtttttgccgcgtgaaggatggttgatcatcgcataacttgtcgttggatagttcgttgcgagccaattgatagcggttagcgcatcctgatgagtcgtgtaagcacgccctccgttctgatcccatttggttacgtcagccgcattaaacaggttcgctgcacgattcgtgaaacggtattcgaattccttggcagctttcagcgcttcggttgagtttggctcatccgtaagaattcccaccccaacgtgttcatgtgtcggcatgtcccattcgaaaccggaaaagatcgttttacctgcgtatttgcctgcatcctgaagtgccttgatctgtggtacctgatattcattcattccctgggacatgggtattggtccacccgaaatgtcgttcccgttgtgatctcgcttggataaccgcaaatgatccgtaagcgcaatccagtccagcccatatttggttaaacccgcgtcgagcacgttctccagtgaaacctgtgcatcatcggactcaaacgtatgtacatgcaaatctcccgtttgccaagaacctgttgccgagctgttgattgatgtgttatcccccgcatctgcatacgttatcgcagcagggaaagcccccatgaccatccctgtagccaagggtataagtgtaagcatagcgagcattttcttgcctttattattgaacaaaatcatcccaccacccgttctgagttgttgtgtcgggagtaaatataagaaactttcgggggcagggtcaacggcctggaggtatatatttaaaattttacatatacctgcattctttcatattccgttaaaggtttttctaacttatcctaacgaagttatactctatactgctccatattgggggagtgaatctagggataacgctgcaaattgggggtgatacaaaattcagagattgttcacgattcaggaaagttccaccactgctgtggatcattaggaggagaactagcgtaggaggaatgatgaagtggagaagatagtgggttttgtaaaaaaaatcaggattgcgtatacgctgagcatagaaaaaaagcacccacgaactacaggcataatatgccctgaagccgtaggtactttggattgagcaggattttgattcagcctttacatctttacttttgtgaactgggaacgagttatttgtgaaatccgacctatctccactttataattaaactggaaaaatacgatatatacaccgataatgttgaagatggctaacaacgcaaagatcatatacattgaaggagttgcacacttttgaaaagattctatctaggttttggattaacgatcaccattatcattggactattatcaagctctactccaacagaagcagcatcgaagaaagtaaacttaaaattgtcagatggagcgacgtactatggtgaagttttaaacgggaaacctcatggtaaaggaaccgcaagatggggagaaaccgaagtttactctggagattgggtgagtggtatgcggcaaggaaaaggcaagtatacatatacattagttgaaggtggaggtgtcccctttgaggattacaatgaatctaatatgggccatggaacaggtgaattcactacaaaaacctacaccggatcatggattaatgatacatatcatggtaaaggaaaagaaattacgcaatggttagaagtacagtatcttacttctgatggcaaggtttaccctgtacatgaccgttacaacaacaccattaacgatggaacattcaatcagggcaagatgtctcagggatattacgcaatccactcttcagatactgtctcactaggatatactgatcatacaactacgattactctcaaaaatgattatttcaacgaaaagttaaccggagataaggacttttttgacacgattatcaattataaaaagaaacacggttcttctgaaaaatatattgggattaaaccatccgaattctccaaaggtacattaactagtggcaaattcacgggggttacgcatctaatcgattatagtgattcagttagttattctaaacaagtcataatgaacgataacgtattaaaggagcatcacataacatctacagcctttcataaagatcggaagaataccattaatgaattcctgcaagctattaagccctattcagtcaaaatcaataccatctctgacgagattatgtcattaaaagacattaactatgagggaatgattcctaggtaggggggtcacaaaatgagaaaaaagcgatggattgtgagcatagtcattttgattatcatactttttatgagcgaattgatgatattgtcctcaggaaaggttggagttctcaacataacgcagagagttatttcaggtgcacctcatgttatcgttcaagggcaaacactgtcttaccaaggtaaggttcattgggaggatatccaaagtagtatcgaagaatattccgtaagcgatgaaggaacggtcttgtataaagcactaggcacccccgtccccccaccttggatatatgtgagaaaagaaaaccatcagggtttccgatataaaatcccgcagcttccctggaaactataaaatgatccgggaacttcacgagcggacatcaccagatgtccgcttttgctatgaattttatagtctcactcgctgaagggtgacatgtcctatggttcaggtatcaaatacaatccacactattgttcctctcacttttcttccaatccattaaactgcctgagcatggcggtgaaacgctccagttccttatcatcccatctggatatacggttataaaaagctgactccttctccttgagcgcaccaaccgtcgattgttgaccaagttccgtaagagatagtaacaccccgcgccgatccttggggtcttgctctttgctaacatatcccgacttttcgagttgtttgattaatcggctgaccgagctgcggtccattgcattcgcttctgccaaagccgcggcacttgttgggccataggagtagagccaccgtaccagttgaaaagcggcaggttgcaggttcgcatcaaaacgctcggcagatcgaacgttaagcgcatgcgaagcactgatcagtgcatgaatctgctcacccagcgctagctcgagggttgctctatctttggttttgactggattttcactcattattgttaactccctctcctcgatatatgaaagtagacttctggaaatatggttgacaaatatcaattaatatttatagttgatttatgtccattatataattacgaatctatttgtgtcaaaaggagatcttctcatgaaaactaaacatcccattattgtaattaccggagcaacaagcggtttagggcagcttgcagcaatggaactcgccaaacacggggcacatcttatactcacagcccgaagcaaggaacgtgccgaggctaccaggtacaaaattaaggaaatcatgccttctgccaaaatcgaatttttctatggagacttgtccttactgagtgaagtaaaacgtattgagcttgagattgcagccgcttatccgcgtatagacgtacttttgaataatgccggacttcatgcttttgaacagcgagtcacgtccgaaggatatgccaagatgattgccgtcaactatttggcaccttggctgttaacgcacaccttgcaatcttccctgattcagtcgggccatgcccgtgtcgtcaatgttgcatctgaagcttcgcggaatcatggcacactggtgttgccagatgacttaacggatatcactccttttactgcacgcggttcctctccaatctatggcaaaaccaaactgctcaatattatgtttactggggaactagccagacaatggcgtggaaccggaattcgcgtaaatgccttgaatcctggctttaatgttacgggtctaggacgagaactatggtttgcaagtgtgcttgaacgcatgttaacctttttgcacatcggcgacccgcgccggggtgcggatatcattactcggttggctgtggattcgaagtatggcgaggtatcaggaggatatttcaatgtgggaactggagcttctattgttcctatacatcctggcggagatgaggccatgcaaaacagactgtggatcgttacaaaacaactgatgaaagatcacggcgtgctggattaattgaacaagaacaggggtgttccataagccataaacacagctaggaacaccccctccttttttcagtaattagattgctgcaaataccttgtcaaaacctgctttcgtcttagcgaacagttcacttgaacttagattcgatgccggtgccagtacttcctgagccaccacaccattgtagccaatcgcctgcaggtttctcagaaacccactcagatcaatgaccccttcgccgggatacaaacgctcataatccaataattcttccacaggcagatcataagcatcgttgatatgcacatgaacaatctgctctttcttcaacttcaacagatcttccatcggtaaaccatttgtttgccagtgataggaatctacgagcaaacctacgttaggtgcatggatggtctcgatccagtccagcgtatcctccacacgccagataaatggatttttccattgcgtccgcaaatgatggcaacccacaaactccagacccaacttaatcccgtaagcatccaagatatctgcacagagtctcaagcgtttcgtagccgccgccataaattgcgctgccggttgatccgttgagggtaaaatatacgtgcaacagctgtaacagtccagcgaagcagaagcttctgccatagcgaccaacgcttgcaatccctcacggaattgctcatctgtcgtccgccactctaccgtcagacccgatgaaccgatgatcacctgattactctctagcagatgttgtgcctgttccttgccatacctttcaatcaatgagagcggattcaaatctacagatccgaatccgtgcttggccgaatcaatgatatattgttcatcagactcgatgttgcccagtcccgcattcgttaaccctctaatcatcccaatctcctcctgtgactcgtctggaattgcagcttgtgtatcattttctttatcattttataatagcagtactctccgaaaaagaaaccatcaaaaaagagccgcaacaacgttaccttaacgtcattaccgctctatcttttctatctcacactctccaacgtataccgattacgcggaatctcaagacccagattctcccgaagcgtctcatgttcatactccgtacggaacagccctcgttcttgcagaaccggaacaactagctccacgaaatcttccaagccattgggcaccacggtacgaacattgaatccgtctgccgctcccccttcaaaccattcctgaatctgatcagcgatctgatccggtgtaccaatgaacgatgtccgtggggtagatgccagcaatgccacttggcgcagggttagcccttgttctcgtgcctgctgcttgatcttgtctgttgtactgcggaagctgttgctgccaatctccccaatctcagggaaaggttcgtccagcgcgtgctgggagaagtcataatgatcaaagtaccggcccagatagttcagcgcctgatcaatactcaccagttcggcaatttcctgatacttctgctccgcctcttcagctgttctacccacaatggggccgatgcccgggaagatcaggatatcctctgccttgcgtccataagccaccgctcttgctttcacatcgtggtagaactcctttgcttcctccagtgtctcatgtcccgtgtagacggcatctgccgatcgggcggccagatctttaccagattcagatgagccagcttggaaaatgaccggatgaccctgcttcgaacgccccacattaagcggaccctgtaccgagaaatgtgttcccttgtgattcagcgtatgtaacttggcaggatcgaaaaatacgccctgctctttgtctccgataaaggcatcctcctcccatgaatcccacaggcctttgaccacattcaaatgttcttccgcaatttcgtagcgtagcgcatggttcggatgttcgcctttgccaaagttcagggccgaaccttccagaggtgaagtaaccacattccaaccggctctcccaccgcttaattgatccaacgaggcaaattgccgcgcaaccgtgaagggctcactataggaagtagacaatgtagcaaccagcccgatgtgggaagttgccccggcgagtgcggacagaagtgtcaatggttcgaagcgattgagaaaatgaggattggacttctcgttgatgaagaggccatctgcaataaagagcagatcaaacttgcctttttccgcgatacgcacctgcttcttgtagaactccagactaacgctcgcgttaatgggaatatccgggtgacgccaaaaggaaatgctgttacccactccgttcagattggctcccaacttcaattgtcgttgtgacatatatattcctccctatgttgtgttgatgacactgcccaggccgctccaagcaatacaatccctgtgaatagaaaaataaacggaatgccgatccatccaccgagcaaaccaccgattaacggtccgaggacaataccgaactgactcgccgtctgactcagactgacagccctcccacgaaagtcgtgatcagcatatttgatgatcagcgcattaagcgccggatagactgcggcaaagaacaaaccataaacaaatcgcaggctgccaaaataaatcagattatttgctgtcatttgcagcagactgccaattccgccgccaatcagaccaataaacagtgttttctcgtatccgattcttccgccaatcttgccccagcgcggccccataatgacggttgccacaccaatcgccgagaagacaatccctgcactaagtgttgcactgccaacatctccgccaatctgaaccacatagagcgtcagcaccggttcgatgatgagaacggaggtcgagactaagagaatcaaaccgtagattcgcatcaaacccggcatggaagccgctcttttcaaatcccctatgatcttcgttggaacgatcgtacgagcttgtcgtgactccttaacaccgaggactatcagagccgcgagcaaggtaatgacagccgatgcaatgaaacatccccgcagtccgatccagtgacttaacacaccaccggcaagaggaccaagaatcccgcccgcagcgctggccgtggagattacgccaagtgcataacccacctgtttctccggagtattagtgccaatcagtgtaatcgaggcaggatgaaaaccagccatgagtccctgaaagaccctcaccgcgataaacgtatatggatcgtaaacaaagaagttagccagatgtgcaatacctagccccactcctgaacggacgagcatcagtttgctgccatatttatcagccagcgatccccagaagggtgcgcataatccactgatcagaaagctgatggaaatcgaaatcccggaccaagcttccaggccactctggatacctagatcattttgcaggaatataggaaagaacgggacggacagcgagtaggccatatgattgaaaaacaggccgaaccacagaatatacagatttctcttccattgtggcatcttggcattctccatactatataattcctatataaaaagtaggttattatccatattagggtaacgttatcggaaagtataatagaaaagttcaatagacccattcaagaattaaatgaatgggtctatcttatcggcgatacatcgtattaattattgttctaactgtgattgatactcgtgttcgaatacatgtttcataatagccaattccatatttttcaattcaattattttatcaagcatgacatcatactttttgtatacaccctgctccatgatgaattcattcatatacatgaccagattacggagtttcaaagcttcgcttaccagttcttccaatcggatttttaacgaaggatcggggagaaagtcaagtatggcttgtgcaagcagttgtttatgttcgtaaagcaggtgaaaaggatgtatagcaaacggctgattttgcatccctttcttctgcatccccagcatatcaatcatcttatcgtatatttcacttccaagataacggtgatcctttctcagaatactgcgaacttgattagtctctcctacgtattctttcaaaatattcattagatcctctttggaaaactggagaatcgtttcataataatattcactgggttccttatactcatctgtcttttcaatggcccatattccatttaggtaatccgtagaccattcagcatcgaaattcgaatcttgaataacagtgatctcatcatagggaagccatttctcaccgtagaatccatcccaaaaatcatggcacaaaaactctttacgatccgaatcaaatccagagatgaatacctcatgtttaccaccgccaggaatatttctcaggaaataaatataattattcttttgaattagttccactataaaatcttgcagttcccactgttttaaaattatatctctatcgtacacccttgtaatcaacatagggcatgtcgacattttgaatttgtgccaaggataatattgtgaacagacgtccaatccatagcccccttcatcattgtgactcaggatgaccaatagaaaattatgataaatccagctaagtgaacgcttgtccaaatctagcatggaaaagagactcgcatgatgtgggtaggtagtcattaaaggctcgttcatttgcaattttttaatcatgactgatctccaatcctgagcaatttattaagttatgcttctccagttcatgaatggcttccagtttgcttgtgaattttctccactgattatgtgtcatattctcccgatataccgccttcgccagcacattacgtaactcactccaatgatcctgtattgcctgagcagcagaaacaagatcggtatgatcttcatataaccgttgcatacgataggtttcgacctttttggcattcacaatgtctacaatggattggagaacaagttcagcataagccatatcaggtgaatcttcttcattgaactgatacgtcttctgtatgaaggacagaagatgactcagttcctgattaatctcttccggtgtaacgcgcacatgatcaataaacatgtcacgcagttctcccagcatgatgttgtttcttttgtgtgagacagtctcacaagctgaaaatgcgtagaacgtgggtacttcttcttcctccatgaaaagccgtacgaatccttcgtaagcttgtacaatatcattcataggcatctccatcgtttgatacgtgagattgtcccggtgatcatgttctattacatggaacacttgccgctggagatcatacccatagattaataaggaatgaggccagtgggtacgtaaatacatgtctttgcgcaaggactcgtaataacagtccactcggataattactgggcggttcaaattaaccgcttctataatctcttttcgaacatcctcgctgtaggtcttcgtttcataagttagccccatacgctcaattagctgggcatctgataatacagcttgatactctaatcggagtatgccctgatgttcatcgaatctatagtgcattcggtcattgatcatcacaggcagtacaccaatagaatagaggtttaatacgggaaaaagtgaattatagaagcagtttttgtagaaaacatcattaaacgcctctattcctgcgatgataactattggcctatgggaatgatgtaagataaggtgatccgcttccgctgttgccccgacttcttctgtaaattgctccattgcaccatctgtctctggcatatcctgctcttcaagaagtatctctttttcagagttatacttatccgcttcataccccttgtttccaagcacttcagccagtgatgcaatagtctcatgccgcatcacttcatcagcagtaagcggaatactctgcctctccatatcggcctcaagtttgatgacattcagtgaatgccctccaatttcgaagaagcgggcatgaacgtcaatctctttcaattgcaatagatccgaccacaattcggcgagcacctgctctaatgcattgcgtggaagtgtaatatctgtcccttctccctgtaagagcaagggatctggaagagcctttcggtccaacttcccattggccgtatatggcatatgatccaacatggtgtatctggagggcagcatatattcaggcaattctatcagcaaaaaagatcgcaattgctcctgattgatactttggctctccgttactgtgtaataggcacataacagggactgcccatcctgatctgaccgaactgtgaccgcagcagccgagatagccgggtactggagcaacctgttctcgatctccccaagttcgatccgataaccacgtattttcacttgaaaatctgaacgacccagatactccagatctccattcgcattgagtcgtgcgagatctcctgttttatacatataagcgccttcatgaaaaggatcttttacaaacctctcggtcgtaagctcaggtctgttccaataacctctggctactccatctcctgcgatgcataactctcccattgccccgattggcatatgccgatgccgcttatccagaatataaatacgggtattggcaattggatgaccaatcgaaattgtcgaggtaggcgaaagttccttaaggctcgaccatattgttgtttctgtgggaccgtacatattgtagatgcgggcagaggtcatccccgcgatctcctcatacaaggcatacggtagagcttcccctccgatcatcaatatttgaattacgctccataccggtgaatcgactgtaagcccaatctgaagcattcgcagtcgagaaggagttatttgtattaattcaatgttgtgagtaacaattagatgcgcaatacggcttggacttaactgatcctcctctaccgccattatcagtgttaacccgttagcgagtgccccaagcgtttccagtacaaagatatcaaaggagaatgttgtgagggcgagaattcgtttaccagcttcaaaaggaatgctgcgggatacaccttccacaaagtttcttagtgctcgatgttcaatcatgaccccttttggcctgcctgtagatccggaagtatatatcaaataagccaactgctccgacgaaacaactggcagtgagatatgttggtcatcccattcttccatgcgagaaatatcgattatttggcctgtgtatatgagtgagccgatcagatcgggcttcgttagcacaatcgcagcctggctatcctccagcatgaactgcaaacgattatttgcatatgcagggtccatcggcatgtaagcagcccccgccttaagtacacccagcatagccaagagcatgtcttccgatcgggttaacagaattcctacaacagcacctgatcttactccctgagctagcaggtatttcgcaagttgatctgatttgcaatccaagctttgataggtaaggatattatctccgcagatcactgcgggaatatccggctgttgtgcagaccaagactgaatcatctggatgattgaacgagcttcaggaaaacgtatctccgtatcattcagatattgaataacctggtcttccttgcgcgagagcatctttatatgatgtaatccctcatctggatgggctgtacacatcgagagcacacgcatcacatggtctacaatctgttcaatagttgctggagaatatagtgcggcattgtaattcatgcgtagcgccagccccactttagacatttgaagtgaaaacaccatatcggctagggggcctgtttcctgtaaattctcctgcatattgtccattcgaaccacagtggccacccttggcaagtctgtcccctcatgaccaagcaattcaagaattttctccagcgaaagatggttatactttttggctgtacccacaagggtcctgagctgaagaacgagctccttaaaagaacactcttcaccaaaattgatgcgaatagcacgtagttgacttgaatttgctgcaccagacgaagcgggaatacctacagttatatcgtcattgtccagataacggtgtaacacgtatgtgacacctgccagaagaagaataaatgcccctgcttcggtgttcccggagatacgaaatatttgttctgaaacaggttgaggaaatgcaagttgcatctcctcaaacacttcctcaccccatattcccctcgtttgttcactagggaacatgctgaagtgaaggtcccccgagagatggtttagccaatattgcttctcctcttcgaactttcggctcgataatagcaaattttgcatgaatgcacctggctctgctgacaattagcacgcctcccattctctttgggattaagaataatcagattaggttgagaccttttttctttgccatcttttctaccttgcgcagcataacgattgagatgattgtatacgaaatggcaaaaaagataaggatgcaccattccatccagatcggtgcaaggggcacccaatctgttttgaaactgtaataacgcaccatatcatacccccaggtataaggcaggagatatgcgatccaacgaacgactgcaggaaactggtccactgggaaataagcacctgctacaaattcaaacatgataaacaaaatacccacaatggatgagacctggcggtacagaattcccagtagtgcaatcatgacgccaagcgccattaatgcaacgatgaccacaagacaggtgactagaatcatcatggattcagcaaagttgagacctgcgtacagaacaagcaggatatacatcggtatgaacacaatgacattcattaatgcactggctacaaccgtccctacataatacgcataacgagagattggattgcagtacagatactccaatgtgccgttatggagatcattcgttacggcgccgagcggagcgttcagtgctactccatagaacagccatacaagtattgctcccagataaaagataaacaggttatctccttgaagtacattctctccctcgtatacaacaaacgtggacatcagcagaaaaaagagtactcgtagacccaactgtaggaagttaccgaagaagttgggcagataccttacagcaatctgcaattccttcacggttgttgcccacacgacggtgaaaaatccggtaggtttacctatggcttgcagctttagcgtttcctgacctgtcccggttttagcgtattcgatactcactgttctctgcctcctgccaatgtgtactctaaattctcatcagacttcacatagagctgaacaaacaaatcttcaagtgttagttgtctatgttgaatggtcgtatggatattcccttcttttaattcactaataaccgcgcccatcccgtcgtacaggttcgtgattccgaaggaaaccgtgtcctcctcctcacgaataatagtggaagttacctccggcagagcagtgattcgctcctgaatggaagggggcaagtctgctctgggaatgtcgatgaattcgactgcgcccaaattggattttagttcggcaattgtacctgttttaaggagcgttcctttgcgcatcagggacacccggtccgtcatgtcttctacctcagtcagaatgtgagaggtcagaataatggatttcccctcatcccgtacataacttttaatgaactcacgtacacgtctggagatcacggggtccaggcccttggtcggttcatccagatatatcacttcaggatcatgcagcaaggctcgcataatgacaacggtttgcttttggcctcccgataattgcataaattgcttgttcagatgttccgagaaatccagatacgtacttaatttgtcaatctggtttgaaatctcttgcttgctaagtccggtaagtcttccaaagaatatcaagttctctcgaacagttaatctcgcataagcagagcgttcagtatcttgacccacgtatccgattagtctcctgatgatgttcgcatcggtatccaaatcgtagccgccgatattgacaattccggagtccttggtcaacagagtcgccaggactttaataaatgttgttttacctgaaccgttggttcccagaattgtgtggatctcacccttgcgaagctcaaaggacatgttatctaacgctaggtgtttaccataggacttagtgacgttctcagcggatagcactctcacttgttctccccctttatgtattgcctgtattgctgaattcatgggagggcgaatacgctattgcagcgcatttcgcccctaatgtaatcactttacgccgacagcctcgtgtaccagatactcagccagttcgtagtgatgtccagtatcatcaatgatatgattcatccactgatttctttctttaacaggtaactttttagtttcaaagatgcccttgagcagttccaacgcttctatcatttgctcttttgagggtttgtcacctgcattttcaacctgttcctgaattgcctggattcgtttgtaacgctgaacaacaccttgttgatactctgcttcatcccaattctggtttggcgttgccactgcaattgctaaacatttagttatgactgtgggtactccttttttcttcttgccatccgattgaaacatgctgatcaatttttgacgttccgctttttcgccaaaacagagcgaattgatatcaggacagttcgttttggtcaatttattcaatacatttttgggtcccatttcgatggcaagtgtgacaccgaaccgctggagatattgaagaatccgtgtccattgcacaggtttgaccatctgatctgtcagcaatcccggaattcgctccacatcaccatagggttgacctgtaacattggatagtaccggccatttgaacatattgtacgaatactttgacagttcttgaccgagccgctctgcatcttccgccatcagcgaactatgaatgggtgcactggacattaggggagtaacctgaccatcggcatccaatacgactgcttcgatctcctccagtacgtattgatgaccggatacggcagcttgtgttggcgaattataacaggagaccacagctacaccctgctcgccgctgtattgttcacagagttgctccacgatggatgcgtcaataccgtccataatggtcattgatcccgtgccccgctcaatatgaatctgcatcattgcaccgcgcaatttggtgattcgaacagcatcggaaaatgtcatggcgcctgaacataccagcgccgaatattcacccatactgtgaccagcacaaaattgtggccgaatccccacttcttccatatacactctgaaagccgctacattcgttgccagaagagcaggctgcatgttctcattttgattcagttcagatagacttccttcaaaacatagttttgccagatccacacctgcaacgtcgctcgcttcctcgtacgtttgcttggcaatgctatattgatcatagaaactctttcccatacctacatactgagaaccttgtcccggaaacagcagtgctattttttccatgtcgtaacctccattaatagggttggtgtattaattattaataatgttcagttctacataagaaggaattttctgaatatagctcatgtcgtgttcaaaaatgacaaggtcctcttcctgatggatttctttgaatccgccaaatttataggtcagatacatcatccgattacgatcggtcattttgaattcagcccgtatcttgaccccggcttctttcgcctgttctaggatataattcatgagaatcgtgcctacccctcgtgacattacacggcaagacatcagcagcagcttcacggtccagtactcctcttccatctcaagcaaagcgagtccaatttttccatatgctccatacttgtcttccagtcctgtaatgagaagtttgtgattaggagattgactgagttgttccagatcttcataggaataggtataccctgtagtgttcagctgatgagtccgcaccgtcaactcttctgcacgctgcagatcatctcccttgaggggtgaaatcgtaaatgtcatgccaagtgaagccagaaagtcatctttgggacctgtgaattcctcttccgccttattacggatctcatcgcttttgtacattaaacggcgaagtctggagtcctccgtaataaaacggggattcatcatctccatgtcgggaatgtccaggtactgggcagcatctatgcatcgaacttcagcatgctcaaactgtacctcttccagctcaaacatctgatcatccacaaaagcaaccgtattcgctccgatattaatggaagttatgatggattgaatcgagctcgatttggaattccagtgaatctggggatataggaagtattcatgaattccgaattcctcaagcttctccatggctgtatgatggtcatttttactggcgatggattgcagaactccacgctcgtccagtgtcctgatcacatcaataattccttctctcaagacaacattctcatcttccagaaggacaccttcccagattgtattatccagatcccagacgaccagcttcaccttctcttgcttttgcttgtccattaccgaacttaccgatggatcacccatacctgaacccctccttggcatattgttccaaactattgcttcaagaccgtcaggcagtctatgctgtctttcgttcaatcagttcattaatcttgttcaacgtacggaagttgctaagatccatatcctgggtctcaatccgaatgttgaattctttctccagaaacatcaccatctgcatcgcaaatagagaattggcaaaacccaattcaaaaatatcctcatcatcctgaatttcacgtttgcgatagaaacgactcagaaatgtttttactttgaccttggactccatgtacagtcacctcgtataatttatagtcgatacacttacagaatcacgtgctcaaagaagccttgaccgctttttgcgcctaacaatccggcatccaccatcttgcgaagcaagggacatactctgtatttcgggtcctgataactctcatagagtacatccaatgaatgaaccacagtatccaaaccaatcaaatccgctgtgtgaagtgggcccatcttatgaccgaaacatttgacgaatatgtcatccacctcttccggtgaagctacctgatcctgaacaacaaaggcagcttcattcatgagcagatgggatattcggttagatacaaaaccgggaagatcttgtaccagtatggcttctttgcccatggtatggagcagggatctggtcgcttcaatcgttgtatccgaagtgtgataaccctgaatagcttcgactacgggctttaacgggaccggattcataaaatgtacaccgatgaccttgtcaggccgtttggtgatggaaccaacttttgtaatcgaaatgcatgatgtattgaccaaataaatgcaagaatcggggcaatagttttcaagctgtgcatagacttcttttttcacatcccattgctcaggcacgttctcaataataaaatcagcatcgctgagcgaatcgtaatgtgtcgtaaactccacacgcgaaagtaccgtttccgggtcttcggcctcggtatccttgttgtagaatcccgaaaatcggatattggtaaataaggctgttctcgcttgatccaaaacttcatcactcacgtcgatcaaaaccacgttgtgccgggactgggcaaggctctgcgcaaccccttttcccatgacgcctgctccgattacaccaaccttcattcctatcaacgcccctctgtgatctggctagaaattgaaattcacttcttcatctacagcttcatccgtgatatccgtgacacgatcaacttcaatatcatagatcaatgtatccggctgctctgagattatctcaagaattttcacataatctttggcgatatattcagctgtgctaggcaagaacaagcttgtattatattccagaataaactcgattgtaccgtcccgctcaatcgcatccagtgccagatcaaaccttgaaactccactgtcataatcgattaatgtgcctttgaaagcctcaatctctccggtgtacatccctacattttgcagtgcaaaatacacatcaaacagcggatttctgctcggatcacgtgtactattcacaagctgtacaattcggtcgaattgacagtcctgatgcgcaaaagccgataacgtacgctgcttcacgtccagaagtaactccctgaatgagtcatcaggcacaggttcgtttctcaggacgattgtattcacaaacatgccaatggtggcactaaagttaccctgttggcgacccgttacaggcgaaccgatgagtatatcactctggttcgtatatttatgcaacaggacatttaaggcggataagagcaacatgtatagcgtggttcctgtacgtgctccgagcttgcctatacgagcagtgagtactccgtcggcataaaaagtcattttggctccatcataggtttttcgatcaggccgtgaaaagtctgttggaagttgaagtgtgggcaatggccctttcagcgtttccagccagaaggcttcctgtgatttaatcaaatccgattgctgatactggttgctccactccgagtaatctctatactgataaggaatattcggtagaggtgaaccactgtacattgacgtgatttcgtgcatcatattgtccatcgacataccatctgtaaccaagtgatgcacatcgaacatcaacagatggcgaccgtcatccaacgtaccaacaatcatgcggatcaacggtgccgcttccagatcaaacggtcggacaaactgtttcactacatcttccactgcttccgttccacgaatgacatctggcaacgtttcgatcgaaaaatccacgttctcgtgaattctctgaatcggctctccttgttcccagtgaaatgatgtacggaacgattcatggcgctgaatcagagtgttcatataaccgttcaacgtgaatgggtcaaaattgccctccataatcaacgctttgttcaggttatagctgatgttgtccgggtcctgagtgcaaagatagaatatccttttttgagctgatgaaagtggatatttttctttgacttctgcatgagggatggactgttgtccgactgttgcactctccacatcgaccaaagattgcaggtgaactcccagtccccagatcgtcggatattgcagcacatccgaaggattaacctgtatccccgtttccctgtatatatccgatgccatcttgagcccaataatggaatctccaccatattcgtaaaaatcatcatacagatccatttctgtcagtcccaaatgaagtgaccaaatccgggataacatctgttccatggctgtatattgaccatcattgcggccgtgtaatgagacttctttgttcagcgttgcctttctcatctccacttcagcaatcacgctggcactttgatcctgaatcgtgttgtatacttcctccgacatcatcattggcatatcacctacgtaggccatatattccgagtcataattcagttcgccgatgatagatcgatgcactttacgctgaaaagcctggtcaaaggcctttaatgcagactttgttaaaacagacttgaataccatgtcatcatttacgccaaaatctttggccatcccggtctctttccaggccacccaattgatcgttaacgttcgtccgcccctgcgattgcgatacgctgcataagcatccagataactattcgctgctgaataatctccttgacccggagagctgaataatgttgaagtggttgagaacagaacaagaaaatcaagagagtcttgggctgttgcctgatcaatattccaggttccctggactttcggaagcaacacacggttaaaggtctccgcatccttggatgcaaggaacccctcaccggctacccctgcaccatgaacaatgccatccactttgccgtactgctctctgatgttctccatgagtctggatacttgttgaagatcacctgtatccacgctgtagagacctactgtggaacctctgttctcaatcgaatgtatccatttaattttgttgcattgctccagatccttgttatcctccaaaatggctggccatgtttcccgatcagggaaatccgatctgcctgcaagaatcaaggtaacgttgtgtctgttagcaaaatgttctgcgaatgcccggccaatgccgcccattccaccagtgatgagatagaccccttgctccttaatggttacttcagagagctcagctcccaacagatctgtcttcctaaactcttccacatatcgttgacccttccgataagcagtggagtagaaaacatcatctgcattcattgcattgagcaaaataggaatagcggtgtcatcatctatatccatgactttgcattccagctgaggatgctcttgtccaatcgctttgcccaggccaaacatcgttgcatattcaggagcaagatgtgattggtggccgctaacttcgtgaacgtactgggataacagaacaatgcgcattcgatttcgcaatcctgcacctgcaatggcttttgtaaggtaaaacaagctatgcacacctcggcataaggcatcctccagttccttcggactctcgggtgctgtatgaccatttatggtaaaggtgtgaataatctgatctattctgtggttcttcgtagctttcaataattgcagatactgatcctccgaaccatcgatctgataatgaaccggagagatcttcgcataggttgcaccaagcgtaacttcaattacatgtgctccacgttcagtaagttcccgggagagactgtcacataacggaattgtccccttcaaaagcaagacggtttgcggattcgaaatgagcctctcaggattagtcgcttccacccagccaatggtgtaatgcatcgttggttcttccttctgcacaacggatgattgaaccgcaactcgttcgggaatatcaatccagcaacgattgcgctcataaggatacgttggaagatggagccggaaggtttcctgttctgcgtacaatctggaccagtcaatatcggctccctgtgtataaagaatcgatatttcctccaagtgctgatcttcccatccatgctcgttaatgagcttcagtaccctgtctgcttgctcgtttaattcacgaagtttttgttccgtcaattcgccaacacccggctccttcgtttcgggaaccattcgatgttcagatgcataagcaacgggcggtttaatctcgctaaacgggcagccacgcagcttgtctaatcgggctaccagctcttctttgtctttaaaagcaatggcgatacgcaacttgtagtgtcctcttccctgagcggctgttccacacaggcttaacaaatccagttcatcgtaactatcgagatattcatgataagctacaatcaatctggatagagagtctttacttttggcggaaagaggcagaatataaggtctgcgttcctctgcctggacaaatgtctgtactggggcctcttccaggataacgtgacaattggttccactaatcccaaacgcgctgatcccacaacgtcgcggtccttcctctgaatgccacgtacgaagacgggtattcacaaagactggtgaattggaaaattcaatcattcgattaggtcgattaaagtacagtgtcggaggaagctttttctcacgcagcgccatgaccgccttcaccaaactaatcactccagcagcttccgaagaatgccccaagttggtcttgatggaactcaccgcacagaactgcttgcgatctgtgtagctcgacagtgcatcagatatgcccttaatttcaatcggatctcccaatgtcgtgcccgtgccatgtgtttcaatgtaggtgattgtctccggttcaactcctgcatcctccaaagcagatataattacctctgtttgagatgccggattaggtgccgtgatgcctattgaactgccatcctgattcacagccccgcctttaattacagcatggatcgaatcatggtcatccaatgcctgctgaagtgatttcagcagtaccactgcaaccccttctccaatacctgctccatctgcttcatcatcaaaagctttggagcgatgatctgtagactcaatgccaagtttcatattttcatcatccaccggacacagattaatcttgattccgccagccagtgcataatcacattgtccgctacgaatagctttgcaagccatgtctacagacaccaatgaagatgaacaggccgtatcaataaccatgcttggaccctttagatccaataaatatgagatccgggcagacatcattgctgtcagattacccaccatggagcttgaaccgctcccaggatcaacttcatataagagtcgtgcatacagatctcgcaaggttgccgcatagcccagatatacgcccgttttactaccgctcaatctggtgccgccataccctgcatcctcaattgcagtccacgcagcttcaagaaataatcgctgattgggatccattagacttgcttccttgggcgataaccgaaagaaacctgcatcaaacttgtctatgtcttccagatacgcgttctcgttgtatttcatctgtgtctggtcatgacctgtgaacgcaaaatgcttgtcaatatccacttttctcgattccggaaacgaccgaaccagatccgtgccgttgacgagatgcgcccacagctcctcaggtgtggaagcaagcggcacattcacagccatgccgataatcgcaatatctccatctcgttccgccccagtacgcttcttgagatgcatcgcagaagaaggacgctgttcctccttcttgttttttccaccgataaattttgcgagatgatgtacattcgagtattcgaacaggtccgtaacattaatggctcctggaaaaattcgctcaatctcactctgaattttcattagcagaatagagtccgcgcctagttcaaagaagttgtcgtgaatatcaatttgatcaaaacctaatatttttctacaacattcggccacacgtttttccgtatcactaaactcttcgttgagacttcctgtcagacttacttctcctgctggatttgtcgctgcactctttgctttgttcgctttttcctgcttctttttctccttgaatagttcaatttgcgcagtcagcacaggagagagcatcacccctgatttttcgagcaggaagactccaccgttctcataattgagataacctacaagtgctctcggtacattatgggataacacctgctcaaacccttcaagagccttacccgttggcaacgtcttaaaaatggtatcgattgtgaaaccaccttcaagggccataccagtctctttccaggtcgtccagttcaccacatgtgtccttctgccgagcttgttccgatattccccgtaggcatccagataagcattggctgcggtataatctccttgaacggctccgctaaacatcgttgctaccgaagaaaacagaataaagaagtccagatcatccgaatgggtaacttcatccaaaatacgtgtacccatcaccttcgggttgaaaatgcttctaaactggtcatccgtacgattcatcaacaggtcggatcttccgattcccgcaccatggataaccccccggatcttcccatgacgttgacgcagctcttctacaattggaactacctcttcttttttggaaatgtcagcgctgtatatttcaacggtagctcccatattttcaatatcaagaactccctgaatctttcggcataacgactgatcctgctgtgcatccaaaattgcttcccatgttctccggggtggaaaggcagtacgattaatccaggccagatgtaccttgtccctgccagccaaatatttggatacttcaatcccgatacctccggctccaccagacacaagatatatcccttctgaatgaagagccggaaattgtccattgttactgtccgactctgcaacaggctggagtgtaccgaatgactgaatataccgttttccgtctcgaatggcggtaaggaagtgatctgtttttctgagaacagactctgcactccccttgctccatagcatatcttccacgtcgataactcgacattgtatgttcagatgctccttgcgtatgaccttggcaagaccttctagcggtgcgagctcgggtctaagaacctgttctttgcctgtgacatgatggacacattgggtcaaaatcaccatatccatatcataatcaataccatgtctggtcaatgaacgaaccagatacaacaggctgtaaacgccgcgttcctgtgattcattcaactccaccagattctgaacagaagtgtccgaagcaaaggtaggtgcgtagatgacctgtgaccatgattttgaatccaaagcattgactaaagaatcaaaatcgacctctttcaaaccaattcgaaaatcagtatcgttcctctgttcatagtaatctcccgggcaaaccttaatgacgtccttacccgattgttgcaaaagcaatgcaaggtcagccccacctttgtcatcagccgtaaagagtacaactctcttgcttgaatgaacttcgttatcctcgtaatctccctcaagctcatgccacgtgagagaaaacaatccgttgtcatggtggacactctcttctgctggtctgcttcccatgtcaatccagcacttctgcgaatcgaagggataacccgccagaggtacggtcttcgtagacttgccctcatacagacgccaccagtccacggatgccccttgcacgtaaagagtacacagacgcccccagtcgaatgtagcctcattcatctggttcaattgttgtctgacctcttcacttaacgcacgaacgtttttctgggtaatatcatgcacccctgaaacttcccgattgtcgctgatcagtcggtgttccccataatgaaaccaaggtgctgtgaacgtatgaatgtctccagatataacctgggtcagcttaaggcgcaaatcctccaaatgttcagccaaaatgatcaatcggtgagcataatgtccgcgacatgcattggctgttcgacacacatccagtaatgaatacctgtcggagaaggcagatactccgtccagatactgtttcatcagaacttgaattccatgatctgatcccgcagacaacgtgaatggatgaacacccgtatgcccatcatgcgtaacgttcaaagtggcctgtacaggagcttcttccagcacgatatgacaattcgttccgctcaaaccaaatgtacttatcccgcatctacgcggatcagcacctcgctcccactctcttaaccttgtattgacatagacgggtgaattcccgaaatcaatattcaggtttggataattaaaatgaagggaaggcgggagtttccgatgatacaacgataaaagtcctttaatcagactggccatacctgctgtttcatacagatgaccgacattggttttgaccgaaccaattgcacaaaattgctttttattcgtatattttcgaaaagcacgttccagcccctgaatctcgatagggtcacccagattcgttcctgttccatgagtttcaatataggccaaggattccgggtggatgcctgctcgcttccacgcttcctcgattacttcggattgagcaaccggattgggggccgtgatgcccatggacgttccatcctgattcaaagcgatgcctttgattacaccatagatgtggtctccatccttctgagcttgacgaagcggcttcaaaattactgcagccacaccttcacccataccggacccatctgcttctttatcaaaagctcttgtccggtagtcggtggattcaatcccaatcttcagaaaatcattgtccactggcaaaatatccagcttaacgcctccagcaatcgccatgttgcaatccccgttcatcagcgatttacaagccagataaacggataccaacgaggacgaacaagccgtatccactaccatagtcgggccttttagattaagcagatacgagatgcgggtaggaagcattgacgcgatatttccagtcatcgcaatagacaactcttccggattggtatccttgatcatttccttatagttgttactattggcaaatccggtaaagacgccggtattacttcctgcaagcctttgcccgccgtaaccggcatcttcgatggcatgccatgctgtttgcaaaaataaacgatgacaagggtccatcagactggcctcttttggcgagagacggaagaacttataatcgaattgatccacttcatccagaaaagctccatccagatattgaaggaattcgtctgaatatccgcttagtttgaggtactcatccgttacagattttcgatcagatggataatcacctatgcaatcaatcccctgctcaacaatgtgccagtattcctccggacgattcgcatggggaaatttaaggctcatgcctatgactgctatatcctcttgatgatttgcttcttcctgcttcagcagattgatgacctgaatccccgtcactttgtcaattttgccggaggctatgttttcaacaacatgtttgtagactttctccacaagctcactcccctggccgtatttcatccaaacgatgaagaatgtcttcgacagatacttccccgtcctgcaacttgtccagcatatggcttaatgagtcattccaatctccgtcctgctcttctgatgcggatgttatcggtgcagcttgcaggatatgttgctcatttcctgcaatgtaattgctgagtttgtctacggttgtatattcaaacagatctaccagtttgatcttattggggaaatgccgatccaataactcatgcatctggcccaacatgatcgaatctccccctaattcgaagaaactgtcataaatattgatttcactgaaccctagtaccgaaccgaaaattttggcaatcagatcctcagcatcgctatatgctccttctcctgtcctgccatccagagtaacttctgcataaccggtctggttctgagtttcaggaaacacagttttctcatcagtagccaaggatctcaggtcatcagatagtctcacagcaacacttgacatcatgccaagcaatttgctttcacgattgatctcgccgacgattacccgattcaagttcattcccatcgcacgatccagccatgcaatgccctgctccgtaggaatggcagagaatacgccatccacattgatgccgtaacgaacgcccatccccgtatctcgccatgtgttccaattcatagttagggttcgtttcccgagcttgcttcgatatgcagcaaacgcatccaggtatgcattggcagcagcatagtccccctgacccggagcagcaaacaccgaagagatcgtggagaagagcaggaagaagtcaagattatcctcaagcgtgacctgatcaagcgcccatgttccatggactttgggacctatcaccgctgagaactgttcctccgtcttgcgcatcagcatgccttcaccaggtacaccggcactgtggactacgccacgaatgggaccgcaggtatgtcgaagttcatcaaatacctcacgtagcctatccagatgcccgatatccacttgataaaaggaacatgatgttcccttcttctccaaatccgtgacgcggtttatcgtctcgcacacttccctgtctctgttctgatcaagccattcaatccactggtcacgcggcggaaaaggtgaacgggcaagcaaagcaacatgtcctgctcccttgtcagccaagtactgggcaacttccagtccaatgcctttcgtgccgccagtaatcacgtatacaccgtcattttgaattgctggcgcatggccgatcaccgtcgtatcgttcaaagtctcgaactgctcctcataacgggtaccttcccggtaagcaacaagatacaaatcagacttccggccgatctcttgtaacacatcttcagcagagacaacatcatcaacgtccagaaatttgcaggatatgcccatcaattcctgacctacaactcgtcccattcccataaaaggagcttgttgtggctgaaggacacgttcattacctgtcacttcgttcacataatcagataccagcgtaaggctcagcccgcgttcataacccacatgtgccagcgcctgtgtaagatacatcaggctgcgagccccacgttgctgggtcacctctaattgttcgatactctcgggaaatactgcttgctcagtcgttgacatatggataatatgtgtgaattgatactcggattgaagatctgttaacaaatcctcatacgcctctttatttgaatcaacgccataccatccatcacctggagtagaatccttttgaagtccaatctctactcttacaactttccgacccgcagctagtaatctctcatagatcgatgccgaaagagcggtttttcctgtgaacaataacacatctccagattcggaggacatccatgatgtcccatcgttggatggcgtgttaacccaacgaataacatgaaatggttgttccatacgttccacttttacaggggcgacgtcgggtatgtccagccagtgtgtcttacgctcgaaagcatacaccgggagccgcactttacgagttgcctgtccgtcattccataataatggtggcaaatctgcgcccgccgaatacaactcactaattttgacctgcatggattcgtccctgtacaagccgtccctccacgctaatgacacttcttgaatttcggcgttcaaactttccttctgaaccagagtaagatcatccggacgtctaatcccatccgtacctgataccaatcggtgttctccataacgatagaaaaccttgccggtgttacccagttcaggctcccaaaagtagagccggttcaattcattcaaacgggaaacaagctccattgtcgtattcactgcaaaaattaatcgatgcggataatgactgcgcccagcctggaccgtgtaacaaatatcctgcaaatccatttgtaataattgcgggccatatgcaacgtacctcgtaacaagttgctgcaagctctcacgtgatttggctgaaagcatgaacaactgtggcccaacgtgaggaacatggtcagggagttctttatgggtataatccgccggtggctcttccagcacaatatgggcattggttccgctcatgccaaacgcactgacgccagctcgccgcggatggccttcaacctcccacttacgagtaacggtgttgacgtatatggcagaatcgtaaaacgggatattttcattgggtcgattaaagtgaatcgttgcaggcaattccttgtttttaagtgccaacgctactttgatcaacccgacgattcccgctgcctcaagcagatgacccatattggctttgacagatccaatcgcacagaaatttcgtttgtcggtgaacatacgaaatgcattcgtcaaactgtttacttcaatcggatcccctaaaggtgtacccgtcccgtgagcttccacataaccaatggtcgcaggatcaatgccagcatcatcccatgccttgcgaatcacgtcttcctgagccgccggatttggtgctgtcatcccggcagaactgccatcctgattggatgctgatcccttaatgaccgcatagatttggtcgccatcctgtttagctttttcgagtggtttgagcatgattacaccaatgccttcgccaaatcccgttccctccgattcctcatcaaatgcacgcgtgattccatccatggattccatacctattcccatgcgtgtattcgtgtgatgaatcggcatcgtatggattttaatcccacccgctatggccatttcacacttgccactacgaatcgattgacatgctgcatctacagcaacgagcgatgatgaacaggctgtgtctacgaccatcgacggccctttcaagtccagcatataagatactcttccagaggtaactgctgctgtgttgcccaccatagcgctggatagcagagtcggattggtttcataaatgagtcgtgaatacatatcgcgaatattcggcgagtatccaacaaacaccccggtataacttccactaatgtcttctacacaaccggcatcttcaactgcttcccagcatgcctgcaggaagagacgctgatgtgggtccatcagacttgcttccttgggagacaaacggaaaaaggtactatcgaacttatcaatctcatcaatataggacccttccacaagagcaacgctgccctcaggaaactgtttatatcgaatatagcgatcaatggcatcctttcgttctgcagacaatgctgtcctgcaatccaatccgttacgaatattgtcccagaattcatctgtggtgttggcgttaggcagtttgacggaaataccaataatggctatgtcctgttccgttcctttcatcggtgtatgatgtgtcatgttgttgcttccctggcgtttatctaccagaaaacgggccagcttatacactgttgcgtgctcaaacaagtccgtaatcataagtgaacctggatcaagcagttccaatctggcatgcattgtttttaacaagagggaatcggctcccagttcaaagaaattttcatggatgttaatttcctcgaaacccaatacctgtctgcaaacatcagcgacacgtcgttctgcttcggtgtaatcctctttttcttttcccgttaggatcacctgacccgtgccatgttgtgaaagtgatcgggtagaagccctttctgctatagacctggtcgtagacttcattctcttcaatcgttcgagcaaatgtggagcaacccgaatccctgaacgttcgagtaaacgaatgccccctccatctatgtttaattccccgataataacgcggtctactttttgagtaacaacgtctgcgagagtatggatcgcctgttcaggtaaaatggccttaaatatagtatccgccgtaaaacccgaacgtgctgccattccccgctccctccaggtcacccagttaatcgcgagtgtgtgaagtccctgcttggttcgttgtgcagcgaacgtatccaggtaggcattagctgcaacataatctcccatagtcaacgtgctgaatgttgtagcgatagaagaacataacagcataaaatcaggctgatcttgtcgggtaagttgatcaagcagccatgtccccctgatcttgggagccaacgtgcgcttgacgtcatcttcactcttctgatcggtagacagatcactgcccgttcctgcacaatgcacaattccacgtatagaaccagccgtttgtctgatatcatccaacgtatgggtaagacgcatttcatcggatacatctacgctaaaataagttaccattgctccaagactctccatggcatctatttcacgaataatctgctgaacagccgtctggtctttcccattcttacgaagcaggggccattgctctctgttgggtaattcagtccgtcccagtaggacaattcgtacctttgtctgaccagccatccatctcccaatctctgaacctatcccccctgctccacccgttatgatgtatactccatcttcaaccagttgccagtcgctattttcctgagtctctgtgttccattcatccagctgttcaacataacgaatcccattccgataggcaaaattctcgttggagatgcctataccaccaaccaactccggaatagattcaagtgaactatgttcatctctgtcaatgcactgacaccggatatgcggatattcctttcctataaccttagcccagccgatcaaggcagcgtgctcaggatacagttccacttcgtcccccgtcacttgataagcagttgtcgtagcaattgatatgtctacagggccagacaccgccctctgcaccagagatttgaccagtctgaacagactcagaggaccctctatttccgcctgagaaaggtccgccagattatgcacctgcattctgggcgttgaactcagtagatgaataacacgggttatatcattgaaaggcaatgcaccaagcagatgatcataaacatcttctgaagaaagttgcactagacctgagagtccttccataacggcaacatctccgtcaaatgtcacggataccagctttcgtcccagattacgcaaggtggtttcaagcctttcgccttcaaggtccttatcttttcgcaatatcagggttatcccatcatcaattggctgctgctcctcatcgggtatggatggttccaaagaatccgcgatccagcgcgttctatacatgctccgatacatgtcatctgtctggcgttgatccatgtccgatttccagtccagccagcatatgttcggttcaaactggtatgacggaagtggaatcctgcgcacagacttttctctgtacagatcttcccaactcacatcggctccctgaacatacaaatcacaaatggcctccaacagcacttccctcggatgaacatgaggttcagaaagccatacttgggccttctgtccaagtagtctgacctcctgctccgtgatttcccatgtacttcgcgtggactcccctgcaccggctgttattatccgatgtatgcctgtgtgtactccgtttatctcgagatcaggaccaccatttacgtctgatacaagcttcaattttctttccaaatccttgcgatcactgtaagtgatcgcaagcctttgagtgtagtgccctcttccggtattagccgaaaatgatagatctgccagcgaaagttcaggatctgaaacgagcaaggcctgatacgcttgcaccagctttgttaagctggcagcacttttggcagagatcgttaaaatttgcatatccggggtcactgcggtatctggcctgtgataacgtggcggctcttcaactacaatgtgactattggttccacttagaccaaacgcgctgacaccacatctgcgtggagctccttcggcatgccatattctagggcgtgtgttgagatagactggagaatcttcaaagttgatttttgagttttgacgctgaaaatgaagtgtgggtggcatcatgccttcacgcatccccataatgaccttgaaaagcgaagccatgccagctacacaatccaagtggcccacatttgttttcactgaaccgatagcacagaattgtttcttgttcgtaaacttttggaacgctctgcgaatggcctcaaactcaatgggatctcccatatctgttcctgtaccatgtgtttcaatataattaagcgtctccgggttaatccccgcatttttccatgctttcaccagcaaatctgtctgtgaagcggtattcggcgctgtgatgcctacggaagttccatcctgattcacagcacttcctttgatgactgcataaatatggtctcgatccctgagtgctttgttcaaaggtttgagtataatagcggcagcgccttcaccccagaccgtcccatccgaatctgcatcaaatgcctttactttgccatctggcgcttccacaccaagcttgttcccttcatcgaggggaaacaaacgtatctttacgccaccagcgacagccagatcacaatccccgtttcgaatggcctgggacgcgagatggatggctacgagagaagatgaacatgctgtatcaagacaaaggctcggccccttcagatccagcaagtaagaaatccggctagccagaatggaggccagattacctggaactgcactgggatctgcctgaggttccaagtcagtgattaatcttttgtagtcatatacttcatcgtttcgaaacccaacgtacacacctgtgttgcttcctttaagcttcccgcccccatatcccgaattctcaatggcatgccaagccgtttcaagaaacaaccgctgattggggtccatgagagaagcttcacggggagacaggttgaagaaacgataatcgaatcggtcaatatgattcaaaaaccctgctttggtatacgcgaccgactctccccgtgtcttcatataataatctgtgaaagattgtcgttctgcgggaaaatcgctgatactgtccacaccgttaaccagattgctccaatatgcctcgagttcctctgcaccagggaatctgccggacattccaataatggcaatgtccttagtcgaaacactttcgatatcgaccgattctgctccggattccaggagatcatccagtttaatacttcccattaatccttttctcattttgctctcctttacagtcggcttgagatcattcgagtatcgggttcagtagtttaaagtagagttgcaagagtgactctaccttgctcttccgccatttcattgaacggaatccacatacgaagtgcaggctgtcctcctgatgaaccacttgtaacgttaagtcgtacagttcagacaccggcactcccgaagcaactgcaccagcgttatagaacaaaggtaatgttcctgtaccgggctcctgcaaaagtgtactaacatgtttggtgtggaaggtctctctgccatcttgacccttggattgatggataagctggaataattcattaaattgttccaacgagccgaagtccagatcaaatacttgaatatagtcggactgcccaatggctgcatgcacacttatccgatcacggttggaggcctgtgcgagaaggtacgcaaagccggcaaataaaatatcatccacctccacgtcccacctgctggcagcattcaccacacgatcatagagttctgccgataaggcaaactgcaactcttctgtttcgtttgatgttgaatctccttccacgaaataatccatggacaagggaatgcgggagcgtgatacatggattacatccatctcgtccaactgattctcgataaatgcggtaatatccgaaatagttggcaaattaaacatgtcggttatcttcacaattcccggatattggtcatcaagtctggcatgtgctttgatcatcagaacagaatcgccgccgatctcaaagaaatgctgattcacaccaatgtgagcattgccaagtacttcgctccatatctgtaccaatagtttctcaatatcattggcgggagccttgtattggacctgagctgtgtgtagagctgttggttcaggtaatgcgttacgattgatttttccatttgctgttagagggatggcttccaaccggataaagaatgaaggcaccatgtactccggcaatctggatatcagaaactctcgcaattcagcaatggaaacttcttgatcagagacataataggcacacagatattttttcttttgctcgttctgcctgtccattacatacacacgcttcaaggcgtggtgctgaatgaatatggcttcaatttcaccaagttccacgcgatgccccctgattttgatctggttgtcctttctgcccaaaaattcaatgtatccctctttacgcatgacgccatggtctcccgttctatacaatcgaccaaggagcggatgctgaatgaatgctttctccgttttatccaagtcattcacatattgatttgcaagacctactccgccgataaacatctcacctggaacatcaaccggacatggacgcagtttataatcgagcacatggaatgtttgattcgccaacggatacccgtaagggatactgttccacgcatcagatattgaattaatagggtaataaatggaccaaatactagcctctgttgcaccaccgagactcacaatgcttgcatcaggacacagatttctgactttgcccggtaacgatagaggtatccagtcaccgctgagcagtataagacgaagactgctttgatggttaccctcgttggtgatgtttactgctctttctatatcagaactttggatatttaacttagccagcggagcggtctgtgcacccaggactgctacggaacgttccgataatagggatgggtcagcagccattgagttttcgccataggataccgatacgcttggactttgcctgatataatttctgctgctccattcttctggagaagccatttcatcgtctggcttcaatcctgcttccaccgtatgaagccagatctgattttcatttaaattgaataacggttttattttctcaaaaggcatatctccaatcgaacacattccaatgcccaacatctctccaacactgtttagtgtggataccataattccggtatcaataagggagtataaataaccttgcgcgccatatttcggcatggttgcttccgcgttgtaaatgaagaaaacagtaaacgctgaagactgataaatggacctgtttgtgtaatagtgcatttcatcagtgaatgactgattgccatgaataaggcgtaccgtgtaatccactggactaaagtagtacaagcccgcctccattcccgcaactcttccttccttcacatacacaaacacatctatcggatatagccctcccgcagaaggatagtaataccgaatttcctgtccttgatcatactgacccagtactcccatcagatcggagaactgtttcatggtgacaggctgatcctccttaaaggaacgatgagaacgtcgcttggagatgaaatcaggatattcaacaccacgctccagtgagacctcaagtgtggtgttctcaccgaaattacgatgcaactgtatttttttaaattcctcgtatgcctgtgcatcgtatgccaccttttcgtcatacggattgcggaataactgcgtctgcttcttgaaaatttccgctggctccataagtccgctgaccaaagcacgtttgcgaatgagcagttccatgagcgaattcacttcactaacaggtacattcgggaagaaagaagcaatctcggattgccgaatccccttttgtgccaagaaatacagttcagggaacataccagttgcatatgcagggcatttgaactcatccacgtagatatgctttccatccattcgccacagcgtggagaatgaccagtggtacaccgattctactgactctttctccatagcgagttgggttgacgtctgaatctcttcatcacttgcccaacggtaacttcgtccagcatcggattccagtcgatccatgaacatatccataatcgctggaaccgaattccagattgtaacctgatggcgatcaacggcctctttcatcattcggatatctctttggtcggatataattacgagagctgcacccgaggaaagtgcaccgaacacgtcatatacggataaatcgaaacacatggaagatacgccaagcatgcgatccttctcatgaacaccgaactttctgttcatatcctgaatcgtattcgttacagccccatgagtaatggcaacacccttcggtctacccgtacttcctgaggtatagattacatatgcaatatcatcaggtgttccagatggctcaccttcgagtagaggataacctgaagccgagacctgatcataggcatccacgtccaatacaatttggcaatcactattcttaagcatgtaagcttgccgatcttcaggataatccggatcaagtggtacatatgccgcaccagtgcgaagtatagccattacatttacaatggtctccatacggcgccttgctacaacgccaactcgatcccctcgcccgatctcctgttcaagtaaatatcctgccagttgaccagatcttcggtccagctccgaatacgtcatccgctcatcctcaaacaacaatgcatcctgatctggataatgtttggccatacgatcaaacaaatgttgcaatgttgttggcatgatattttcttctgattggttatacctttccaaaatgctgcgatcgactgaaggaatgtcaggccccgtaatcgtttctcctacaattaggccatccagcagtgcaatatattgcgcaaacatcgtttcgaccacctgttggtcaaacaagtcatccacgtaatcccaggttagcgttagctgccctcccgcatccgaagcctgatgatccagatatacctgcgatgtttggctgaccccagttcgaacctttccaatcagtccctgagttgcttcagatgtctcacgttcattaaagatcatacttgtgaagacaattggcattacagtcttgttccccatttgatgatgcttggagagatcacgtatgaattcgatgccttcataatgcctgtgctccagcgcctccagtatactgtcctgaacatgacgcacatgacccataaaatcattccccgaagccatatccacatcaattaaaatcatggaagtaaagtccccaataatatcctgtatgcttgggtggaatggataacgattgaagactgtcaggttcagtgcaatcttctgttgattgctccagtacgataagatctgggcataggctgcacagagaagcgctgaaggtgttagcccgtgtccattagcaacctttttcaatatctcccaacgctgtggttcaaacacttcattaagtcgcttgaattttggttcgctgatctgtgcaggatctgttttcaatgggagtgcaggtgctgctgggaactcctctactcgggcaagccagtattgtttgtcagccaggtacgtattcgatttacggaattcattgtaagcaagaatataatcgcggaatgtatatggattaggctccggatcaatctcgggatgatgatagaatttcagtagatcattattgaagatctgtatgcttgccccatcagcaatgagcagatcatatccaaacaacagcagatgtgtattttcagatatttttttcgcacgtatctcaaataatggccattgctccaattcaaaaatatgatgagacatacgttctctttcggctatgatcacccgttccatctcatcaggactcaaaccactgatatcttcaatatccatccggtatgccggtacatgtggcaggattcgttgctctccggtaggcaggataattgcccgcagcataggatgatgttcaatcaacttaattagtgcttcattgaagcgcgtcatctccagttgagtttcgaattcgaggtacccgtgtgtcgaagtgcctcccatttcaaaagcctgacttcttcctgcgacataagccatctgtacctcggtcagcgggaatggtcggccttcaggatcagggcatggatcatgctgcggataatgaattgttcccactgactcttcattttccacagagctctcaagcagagccgccagttcataaatatctctcagggccataaattccttgaagctgagacgctgattgaattcctgcccaatccgattcaccagctgcaccattagaattgaattgatccccatctggaaaaagctgtcgtgagttcctactccattcataccaaataccgattcacagagttcaatcagcttttgctccgttgggctttctgttcctgcaagtacactggactgttgtccaaaggttggttccggtaacgctttcctatcaatctttccattgggtgtaagtggaaattcaggcaactggattaaatgctgaggaaccatgtaatccggaagtgcttttgccaaaagacgcttcatctccaattcgtcatagctgcgctccgctgagtaataggctaccagtacctttgttccttgcatgtccactttatctataacgacagcctgcttcacgctaggaactgcagataatcggctttcaatttctccaagttcaacccgataacccctgattttcacttgagaatcccgtctgccaaggaattcaatgtacccttcttttcgcaagactccaaaatcacctgtgcggtataaacgtcccaattccggatgattaaaaaatgcattgtcggtcctcaccggatcattaaagtatccttgagccaatcctgctccaccgatacagagctcaccaatgacatcgactggactcaggcaacccctgtagtcaagcgtatagaatgtctgatttgcaagtggtcttccatacgggatgctcttccaatcagacttgacagtatcaatgggataatagatagaccaaatggatgcctctgtcgcacctcccaagctgataacctgtgccgaaggaaaacgcccatgtacttgctctggcaatttctttggtatccagtccccactgagcaggatgagtcttaattgttcattggtttgatcggttacgtaatctgccatcagttgcataatggctggaactgaattccagatggttactttatgctgttgtatcgcgtcgtacatgtcatgaatatcacgctgatcagcaatgatcacaagtgctgcacccgtcgcaagtgcaccgaaaatatcatagactgacagatcaaagcacattgaagagataccaagcatccgatcttgatccgtcacttcaaacttcatattgatatcccgaatggtattcattgccgggccatgggcagtagctaccccttttggagttcccgtgctgccagacgtataaataatgtaggcaagatcgtcaggtgctgcgttattttccagtggctccaccggcaatttagccaatccctcaaacgtataaagttcgggtaataacagcattttgcagttactattttgtaaaatgtattgctgacgatcttcaggataatcgggatcaacaggcacgtataccgctcctgctttgagaataccgatggtattcacaattgtctccataccacgtttggccaacaaccccacccggtctccccgtgttattccttgttgcatcaagtaatgagcgagctgattggaacgttcatccagctgttgataagtcaattgctgattaccgtaaatcaatgctgtctgataaggagtcttggtcgcctgctccatgaaagacccatgcagtgtagatataggaaatgattgtgctgttgcattaaatgcattccagatggcattatcctgttcaggcaaacctggtaaaaactcgatatcctcttgctcacacagatgagtaattatcgctgtataatcatcgaacatggcggaaagtgtatcgtaatgaaaaagatcctgaatatagtcccagttaatggtcagtctcccgtcagtctccatcacctgattatcgaggtagacttgggaggtctgactgatacccattttcagatctccgatatgctgccagcttccaatggcatccacaaataatgtgctagtatatacaatcggcataatggcggaagtacccgcttctcgatgacgggccagttctcgaatgaactccacgccgtcataatgtcgatgttccaacatattgagcatgccactctgcacgtctcttgcttgttcccaaaaaggcttgtttttttgttcgttaatttcgagcaacatgatggatgtaaaatcaccgataatttgattggtttcttcatgaaatggaaaacggttgaacgccgccagattgatggcaagtcgatcctgattgctccaacgggccaaaactcgagcaaaggcagtacacagaagcgcggaaggtgttacatttttttgctgtgccttatgctttaattgctcccacggatcttgttccaatacccagcttagccgtgaaaattgcggtttcttgatatgtctgggctcctgcttcagcggaagtgctggagcggaagggaatgtgtccaactgatccatccagtacttcttgtcacgtgcgtacatctcaccctttttcagttctccgtatgccatcatataatccttgaatgaaaacttgagtgcaggaagttccttttccggctcacggcaataatgcaccaggtcctctccaaggatctggatactcgcactatcacagatcagcagatcataaccgaataacaggtaatgccgtgtatcatctattttaaaagctttgaattcaaacagcggccattggctcggctcaaacacatgatgggacattcgatcccgttccgcctcaatgcgtttccacttttcctgctcattcagatggcacacgtcaacaatttccagttgatagtctggtacctgtggcaatattcgttgcatgccctcaggcaatatgaccgctcgcagcattggatggcgctgaatcactttttgcaatgcagtctggaaatgcgtcatgttcaatttggtttccaattccagataatagtgagtggatgttccccccatttcaaaccgctcgtctcgacctaacagataagccatctgtacttctgtcaaagggaagtcttcatacagggtcgccggttccggctcttgctggggatactcggatatcgctacagtttccttgagtgcaccaatcagatgaattgcaagcttcgccagattcataccttcaaagaaggtgtggtagtttaggtgaacatggtagcgtacccgtatttcagtaataatgcgcatcattgatattgaatcaacgccgagttcaaacaagttgtcatatacatctaacccggtaaacccgagaacatgtccaaccagttgggcaagtcccttctccttagttgtatatataccattatctcgtccgtgcagttcaaccttttgttcatattcagttctcgtcagctggttgttatgataattcaaatgattacgttcctgttgaattcgagctgtcatggcttccgaaaattggataacccttgacgactctaacaacggtaggagttcactcgcataattgggctcaccgatcaacactcggcgtatacgacggctcaataccatgtcaaaagcactgatcgctttatgagtcgctaacgtcttgaatgctgtatccacattcagaccaaatctggcagccatcccggtttccttccaggcaggccagttaatggttagcgttcggcccgaccctttttcacggtaagacgcaaagctatccagaaaacagtttgcagcaacataatcgctctgccccggttctcctaacatggatatgccagaagaaaacataacgaagaaatccagtggttcctgcgctgttacttgattcagaacccaggttccctgaaccttcggtctcagaacctcttggaatgcagtctcttccttacggataatcaagccatcattggcaacaccagcgctattaattaccccatagatttgcccatattttgttctcaacctctgcacaacctgagtcatctgctccagatcggagatgtctgcactgattaattcaacacttgatcctccggcttcaagctccataatggttttcattcgttcaatcatttccatggatattatctttggatcttcttcttgaataagcttgtcccacacagtgcgatcaggcatcgccgtacgactgattagcgccagacgaatgcagcgttcatcagccagatgcttcgcgaattgcaagccaattccgcctgttccaccagcaataagatataaaccgttctcacgaatagtcacttcctcatgactggcttccagaatgttggcaatatccaattcttcaacgtatgactgattatggcgatacgccacttgaaaacggttatgggagctattcaattctgcatagatcgtatccgcatcggtatctgaatccacatcaatgaatcggcaggatatttccggatactcctgttcaatgacttttgcgaatccgttaagcgttgcattttccggtcgtacctgactttcataccccgtaactgcattcgctagggaggatatgaattgaagctgaagtccctctgtcatatgatgatgtagaatcgcacgggtcaagtagaatgcactctgaattccacggtcctggcttaacttcaattgttcctcgctttgtaaataatcatctgaatcattctctgccagagtaaacccgtgaataatgcgggttagcccctgacccttcatatcatccaataactgaatgtaatcactttcatcaccacgaatcacatagtgcgaatcatcatacttctcgtaacgatccccccaggctacctgaatgactcgtgcttcgagctcacgctccaatcggaccgtcaaggcagcactgacttgatcgtttccgcggaagagaagtacggcgcctttcatttttgagacgacagaatctcgagatacgggcgtgtatcgttgccatacagcttgataaaacatgccctctgcctgtaccttttccgatcttctgttacgttttggaatgtcgatccaacatctgtgcgtctgaaatgcgtaagatggcaaactgaccttgaatacattctgattcgcataaagcgcttcccagtcagcatcgcccccagagacatagtatgaagcagcctgatgtaacgcattgatgtcttgctgcccactgttcatgaattctccaagagcttgtcccagcgatacgctcatctcatgcctggatgagagcgacattctgaattcctgatccgctgcctcctcatcttgaaccagcttgtgaaaaccggtatagatgtgcgaaccatgtgaagtaccaaatagctgttttgaacgctccaactgagtaagtttctgatgcaaatcgatgttgctgttcattatgattgctacccgatatggaaactttcctcttcccgtgttggcggtataacacatatcttgtaatgttggcagttcatttttttcaagaaaatagatatacttactgatcatctgacgtagcgattcctcagacttggcggacaacgtcagaatggatggacctgttacagaagtgttcgcttgatgcgctgcagttgcccgatcaggtgcttcctcaagtacgagatgacagttggttcccccaatgccaaaagagctgataccacaccgtcttggagttgtgccatccgtgttccactctcgtagtgtagtatttacgtaaacgggtgatccactgaagtcaatcgctctatttggcttttcaaagttcaaggttggagggagttttttatttttcaatgccagaattgccttaattaagccagcagttccagctgcttcgtacagatgaccgatattggttttaaccgaaccgatcgcacaaaattgtttcttggaagtatatttcttaaacgcgttctgaattcccttaatctcaatgggatctcccaattctgtccccgtaccatgcggttcgaagtacgagatcgtttcgggatcaatgttaccgtcctcccacgcttttacaatcaactcagcctgagtggatgggtttggtacagtcaatccgccagaacttccatcctgattgacggccaaacctttaattaccgcatagatctgatcaccatcacgcattgcagcgtctagtggtttcagcaataaagcagtgactccttcgcccattcccgccccatttgcagaatcatcaaatgttttggtccggtagtctggagattccatcccgattttctcattctgattctcgcgtgtcataagatgaagtttcacaccgcccgcaattgccatatcacattccttgttccggatggcctgacatgccatggcaacagctacgagtgaagaggaacacgctgtatcaacaacaatactgggtcccttcagattcagaagatacgagattcgattggataatatggaagccaaatttcccacgatggacagtgcacttgtctgcatcgtttcggtaatatatcgcatatacatatctttgatattgttggaaaagcctacatagacacctgtattggtgcccgataatttgtcgttaccgtatcctgcatcctccatggcatcccatgccgtctccataaacaaacgctgattaacatccgttaaactggcttctttgggaggcaaacgaaagaattcatggtcgaattggtcaatattgtccaggtacgccgcttcgtaatattgaatatctccctcaggtatatccatataagagagaatagcgtccatatccgattttcgtgtcttgggaatgggacgtatgcaatctacgccactctggatattatcccagtagtcatccagtgtttccatattgggcaacttggctgaaataccgatgatggcgatatccttgacgggtttcttttccccttcttttagcattttcacgatctgagccgccgttgttttgttcatcttctggtccttgacactctctaccaggagcttcagaattttctccacgcttcacgtccccctacatcttttgaaggttgatgattgcttcatccaaatccattgctccacgttcgatctcatcgaacagattctcaagatctgtatcccgttcctcttcgaaagtttccttttgaggagactggtgaggcttctgcttttctgtggtgctcatataagtagttagtctggagatacttggatattcaaacagatcggtcagtatgagttttccagggtaagttttgtccaatttcaagaaaatctgcttaatcataatagagtctgcaccgagttcgaaaaagctgtcatgtacattcatctctttaatgcctaaatatggtccaactatattcgcaatagtacggtccatctccacggaagattccaatttaagttcatactcttccgttgggatctgaacagaagaagcggattccttcttcattgatatttgctttgctctctccggcattctcatcaatttttgtaacctttgtccaatgttggcatcaagatgaaagtggtagttattcaaaatgtttaaatagggtgagttccagttcaattcccccaccagcagacggtcggtctgttttcccattatttcgaacaatcgatccaatgcccaatctttaggcatcgctttgaataaggtgtcaaaatcaaacccggctctggaagccatgcctacctctttccaggtagtccaattcagcgatattgtacgcatccctttgcggttccgcatcggggcataggcatcctgatatgcattcgcggcggcataagcagcctgtccagtagaaccaaataacgtagcgacggacgagaacatgactagaaaatccggctgatcttcggctgttagctgatccagcagatgagtccccttcactttcggagccagcattgctgtaaactcttcctcggtcatctggtcagcatgttgtgtactcccaacgcctgctgcatggatgatgccacgtatacatccaaaacgacttcttaattgttcaatggcttgacttaactgatctgcaacggcaacatcagctccaagatacatcatctgtccggcccgtttctccatatcaagcaaccgaagaagcttactttttagatctggtgaagtatttttcgcatttagaatgatgtcccaattgtgacgtttgggtagtggcgttcttgcaatcaaagccagattcatacgtcctaatgacagtaagcgttcagcaatctccatccccagaccaccaagtccacctgtaataatgtatacgccgtcttctttccagttcatatcaacatcaggcaaggaacccacatcagcaggggcgaattcagcttgatatgcttgtccatttctaatcgccaaagacttcttctccaacggccccaaaatgtaacgcaaatactgagaggtatcccaatcttggtcaacatctatacagaagcattcgagattctgaatctcacgctgtaccgtatgtccgaaagccagcatggccgaattctccggatacagaacattctcgtcacccgtcacatcattagcaaagcttgtcaccaaaatcatctcaacctgctctgcaatgacgtgtgagcatgccttggtaagtctccatacagacataagacctttgtccagcctgttttccttattttctacatggtcaagtgatgctaaatgcacgatccgatagggacctccaaaggacacttccagcaaaagtttgatataatcactctcgttatttcgaattacatatgtctgttcatcctgttgaaggtaagatgttcccaatatcacttcgataactgctactccagcttcacgaatttggtttacccactgggttgcatgtagctgtgtatcatttcgtattaataaaatacgttcaacattatggatgctggatgagttagtcttgccgatctcgctccaaggcttccatgacaatgaataatacatcgcttcttcctcagtctgtatcgaattatcggggttagtatcaatccagcacttactctcctcaaatgaatatgtgggcaagctcaacttgttataggtcacatctggatagattcttgaccaattaatctgagctccgccttgataatgtgtgcacaactcttctagcacggttgctctatcgcatccttcgatatgccagttcgagataagttcttccgtagtgaataactgattacttttcctgaatgtatcttgttcggtcttgggttctgcaagaaagtcgtttaaatgctgcagcaattgatccaacgaactgaccacccacaccgctcggtgtgcatgatgctgtcttccagtagctgctgtgcagcatacatccctcacatcggccttcgggttctcatggatccacttcacatatgattgcacctgacgggagagatttccggatgatacgctggagatcaaaaagggataatggtcatcgcgccccaattccactgctatgttcggagcttcttccagtacgacatggcaattggtgccgcttaacccaaatgaactgactccacatcttcgaggagtggccgcttcccactcccttgaaatgacattgacatagactggtgatgtatcaaattcgaattttgggtttggtttattaaaatgaagtgtagagggaatacgtttggatctgagtgccataatcgccttcagcagacccgctaaccctgcactgtcgtacatatggcccacattggacttaaccgatcctatggcacagaattgttttttgtccgtaaatctgcgaaaagccgattggataccttccagttcaatcgggtccccaatgagcgtacctgtcccatgtgcttccagataggaaagactctctggatgaattccagcatcacgccaagcatgagtcagtactttttcatgagctaccgcattgggcgttgtgatccctgccgaatacccattctgattcacagctgtgccttttatgactgcatacacatgatcatgatcccgcaatgcctgttccacaggttttagtacaacacttactacaccctcacccattcccgatccatccgcatcttcatcaaaggttcttgttgttccatcactggattcaataccgattttgtaatactctttatccagtggaatcatattcagcctgatccctccagcgatagccatatcacaacttccttcacgtaatgcacgtactgccatatccagagcaaccagcgaagaggagcatgctgtgtctacaaccatagccggccccgtcagattaagtagatacgcaattcttgcaggaatgatggacgaaagattgcctacggtggcgatcggtaacatgtccgggcttaattcctcgaccatctgtttgtacttgtaaccttcttgatctccgattacacccacgtacacccctgttgaacttccagccaaacggtcaccaccataacctgcatcctcaaccgcacgccataccgtttgcaaaaacaatcgttggaccggactcatcagcttggcttcctgtgcacccatacggaagaaggaataatcaaattcatcgatttcgtccagataagctccgttcaaataacgtacatgctccaatgaaccttgcttgtgaagcaagtattgatccaactggccctttcgatgattgggcaattcccgtatgcaatcaattccataatcaagcatcttccaaaattcatccagcgactctccggtcggcaacttcgcaccgatacctataacagctatatcatgtctattatccattgttatatccatttcagtagtagtgtcctggtcatcttcttcttcccattgctctctgtcgaacaattgatcaagcatggccgtccccctatgaaatttcatttcaattccggttgtaccaatagttgaagtcctctcacataattggcaataagacgtttcacacggctctgttttaatttacgtccattaaaacgacaattgcactgcagaatatcaccttcgtcagacactaggataatcagatcgtaatagttcagtacatcgtccgatgccttgaacagatgctgttcaccatataaaggaataattgcccactccgtgctgcttgttctgatctggctcatctgctcgacgggaaacgctcgatcggaaggcatggttatgatctgttgatgaacattttgaaagagctctttcattgtcttgtattgatcgaaattcaatcgtacaggtgtgatcattctcgctgtaccataggatacgtgcatatcaatagagggttgttctgacaacgtgtgtaacaagtaagcatacatagctgatgccaacacatgaatactgatcgcttcggattgtgcaatcagtcgcatatcctgtaccaatgaagctgggagagtgaattgatacgacaaggcttcgtaacctcgatccgtatggaaaaagccccgatccatccgtacaggctccatttccactctgtcttgtctgatcagattcgcccatgagacaatagaggtatgtgaatacaagctggaaatggccatcttgtctggaaatgcatcatcaattgcctgatgaatctgcgttacttttagcgaatcgaatccagcttcagccaggttgtccgttactccgacattcctaagtcccgctacggactcaacaatctcaatcagcttttgttcgatataatcacgagctggttgtacttctttgatctcctggatatggcttaacatgctctgaatagattgttcgatttcactaaattctcctgtttcgtaccgctcctgaagcctgtaacgttgaaatttcccactcgtcgttttaggaatttgcttaatgggcagcacggacttgagttcaatccccatccgctgctgaatatgtgctttggcttctccaactcttggaataaaagatggcaagtcctttttatatagcacaaacattacaacgctttccgatcctgtaagtggattggagacaccacatacagcgactttccccagatcaaactgctccagttcctccgttacacgttcaatatcatgcggatatacgttttgaccattgataaagataatgtccttggttctgcccgtaatgactattgcgccatcattcataaatccaatatctccagtacgaatccatccatcggctgtacttgctttttccgtagctgctgcattgttgtaataaccgcttgttacactcaatcctttaatctgaatactgcccagcaccaattcctcgaccgggttatcataatcatcacatattcgtacatcgcagtattgaaccggcttgcctacttccacaaaagaaacagcatgttctgagcccggttcaacttctatgaatggtttcccggtctccaaatatcttctgtccagtacataacaagtcaaatcaccgacgttaccaaaggaaacaccaacagttgcttcagccaagccgtacgccgtcagcattgtattggaagccagtccataaggactcatcgcctccaaaaaattgaaacaaagtgccggagatatcggctcagcaccgttcataataaaacgtaccgtagacaaatcggttgatgcaaaggttagtggattatatgaatccagaaaatatttataagcaaaatttggagcatatagttgggtgacacggtgttcagaagttttggttaaccataatgtagggtgacggataaataaggaagttggcataataaactgttgcagaccttggaaggtacttgtaagatgaaacgcaatcagacccatatcatgggtcaggggtaaccaactcaaagaacggtcattagaggagatttgggttgctatattcatagcttgtatatttatcatgacattgcggtgtgtaattactacacccttggtttgtcctgtagaacctgaagaaaattggataaaggctatgtcatccggctggatgctagcttcaattccctcaacaataggttcttctagtaggttcgagatgccctgtactataaagattcgggcatgcatttcttggacaacctctttcagtccattcttccgggcaaacttgtccaagctttccgtgagatcctgatcagcagcaataaacggatggttcaacgttttccacacattgtaaagcttcattctttgctcctgatttccgcctacggttatcggaacaggtatgatttttccaagcgtgcaagcccaaaaggtgacaataaactcttcttccgagttcagttggaagatcaattcattacccggctgcatcccaaatgcttgaagttctcctaatcggattttggctgattgcagaagagattggtacgatacaaccttttcttctttgctgccattcagaaaagtaatacctctgtctgtgactgaaccaagggagttaaataattgagccaagttatccatgctcataactggaacacactccttgtcaactagattacgtaaggttgcagcttttcatttataattctcgttgtttcctgaatattttcctggatatagaagtgtcctccatccaatttgacaatgtcacattgtgaaccagcgtactttttccatccgatcagatcgctagatttcactcgggtatcgcttctgccagttaacacggtaatatcactctgaaccttgaaaggcttgggctgaaaacgatagagttcgacaatcctgaaatccgctctaagtacaggtgcaaataacgaaaagagctctttattggtaaagacctcatccgacgttccacccatgttctgaatcgtctctctgaactcttcgtctggcaatgcgtgaatattctcatccttgaaaatatgtggtgcacgattgcctgaaagcatcatatgttcaggcaattgtttcgttgactgtgcaagtcggtaatatagttcaagcgccatccagcttcccatgctatgtccgaaaatagcataaggcccatgaattagtgaggaaaccgtggggtagatatcttcaatcgcttcttcaaagctttcatagaatggttcccccacccgagcgcctcttccttttaattcgatcggtattacgtcaataaaagggcttaaagatgatttccagcgatgaaaaatcatggctgatccacctgcatgaggcaaacaaaaaagttgaattttcttcattagccctatcattcctcgtattcttatttttatcgtaatttatcattttacgtaaaaaaatacaatattttctgtgttattgaatacattatgtagattgaatagataggggcaaatttcccttgttgcttctgaattgattgcgatgttcggtcggacttctgcccacttttttcttgtacattgcactaaattgtgtactagaactgtaccctaacttcgttgtaatttcagagattggaagatccgtcttggttacgtactcctgtgccttatccacccgaatctgctgtaggtatttcagtggcgaaacattgaaaaccttagaaaacagattacacagatacactggattataaccaaccatatccgccagaaattgcagagtaattggctgctcataattgttttggatatacttgcatatcatgatcaagttccgtttgaccgagtcctcccgatccgtttccggtcgcatcaaattagccagattcgtttgatagtaactggagtatacttcaagaaaatctttttcagctatttcgatgtcttctctactctctaccgttcggttcaacagacttacagcaagatcatagtgtttactaccattctcacttaatatgtgacagcttggcagtcgctcaagcagatccgatccaaaaataatacctctcattttcagaacaggtttatcgtaattttgcagtcttattttatttgccagcagcacagcccctgccttaacttgcaccgttttgctaaacacactgatttccaatgcatccataacctcaaatatggcaatctgtcttctgagagacaagtcaaatagatgttttttttcacggacgaccatatcataagaaacaacagaacgtagttggaaatccattatcgttaacctcctgattgtttttcggacggttttgacaagtacggtgctatacattcattccaaatcttaatctaagttgtattaaattttttaagctgattacgaatgtaatccaataaatcttttttctcttcaggtggtatccactccgttagtctggctgcagcaatgggaagaacccaccggtgtatctcgcgaatgtccatgcctgagagagacaagtaatactcgatatacgctttactcatcctgcttttgattatcttcagcagaactttcatcatcaatggagcgcctttgggcaaatttccgtattttaataacactagcgtccttgccacatctgctgctggacagcccgatgcgcctgtcatccagtctatgatccaggattctttgcctgtaatcacattattgggatggaaatccccatgacatagagatctgccttccggcaaactatgtacatagtccatgatctgttgcttctccatgtccgatagatcacttgcgtttgatatattcttctctaatacagtcttatgcttttgttgaatccgttcacccgattgctggtgtatttgatgatgaagtgctgccatctgccttgctctgcgctcaatggaccatggtttaataatcatctcttccaaaagtgtccttccactagccaactcaaatatgatacctttacgattattgatcgtcaccatatcaattgtttgtgggcatttaactccaagttccaaaacgattcgagtattatcaaactcatgctgaatcgcttccgcagagaaatcttctctgaaaagtttcaaaattgaagtttcaccatgtctgaatatttccgctgtctgtccctgcccaatccgtttcaatcctaatcaactccgtatctttcctaaatcaattatggtaaaacatcaaagaacctaatgatcaagcccttttttcatagcataatgaatgatcctgcctaatgcaaaaaaagggctcttccttaggtcctgcaatgcaaaatctaaacgtttcgattcgcgctatccttaactttttccgatttatttgaacgtctcatttcacggcggtgtgttacaacctcctgtgttgcgattaaaatctcatgcatttgagtcgtgccttcgataatttcattgatccgggcatcccgataatatctctctacgggatagtctcgatggcaaccattggcaccatgaatctgcaccgcatcactggcaactttattcaccatggttgaagcaaagtatttggcagtccaagtttccataatgctctctggatcacccacatctcttaaatatcctgctctgtaacacagcatccgtgccgctttcatatttactgacatttcagtgatcattttttgtatcatttgattctcgcgtatagctcttccgaattgtattctggaattggcataatgtaccgatgcatccaaacatgccttggctaaaccgacacagccacaagcgattgtgtatcttccataatccagacaaggtaaagcaacatgtgataaccctgtaccgacttgacccaggaggttttccttcggaatacgacaagaatccatttttagttcagcaatcatcgatgctctcgctccaagcaacccgctcataggttcaacgctgaacccaatggaatctctctccacgataaacgctgtcggcttgttctcacattgggcaagaatcaaaaatacgtctgcaagctgccccatggtgatccattttttatgaccgttaagtatgtattcgtctccgtctaatacggccgttgtttcaatgcttttggcatcgcttccaacactcggttctgtcaatccgaatgaacccaaagttgttcccgtagctaatgcaggcaaccagtactgtctttgttgctccgttccccaacgcaagatcgctaaacccaccatcccctgaacggttaacaaacttctgacagaggagcacccacgtccaacctcttcgttaagaatcccgatagtgatattgtccagttccatcccgccatattcttttggcaacatggagcccagataaccagcctccgttattttcgcaaggagttccggatgaattcgttcttcgctatcatttaaactagcatatggaataatctcgttgtctacaaaatccttgaattgttcctgccacatcaattgctccgcattcagttcaactttcatcacatatcactcctgattttgaggttataagtccaataaacggaactcgatgctgtgattgtctgatatgagcttgtgtcgtcattttccctttatgactcattgggaatctcataattgatgcacttacgcaaactgtctttcagatgttgcaatgttgtgaagttctccaattcaagatactcatcgtccatctcaatattgaattcgttctccaaggcaatgatcagtttgataaatgaaatggagtttaatccaagaactcttaaatcctcatccaacgtacttacatccagcttttgttcagaaaacatttccacgacctgatagaagtgaatatcaaactgatcataagccacaggatattcttgcaaaaaagattcctcctcgatgtgagacatgtaatctttgaaaatccatttttgtgactccatttctgtgatcagaatctgttcgaacgtttgcctaagagtataggaatcggaacaaaaaagtcctacattttgtaaatattccatatattctctgacttcgatactatcataatcttcctgagtcaagcaatcactattgccatgtattcacaaatatttaataggtttccaccttcgagatgatatccctatcttgcgacaaggattcattctctcaaaggtgctttgacataaatacatcgacctcatcttcactgtccaatataaatccaaatcgttcatacaatcgccgagcagggcttccctgcaaaacatttaaaataacacgtttcccctgaacttcatcctgttccagcagcatgttcagtacctgagttcctattctctggccttgataatcgggatgtatgtagaaatgttccaataaatatgcctcagccttgggctttaacgctacacaacctaccattgaaccctccacttcaataatctgtgtctgggcaggattgaatgtatttcggaaacgttcacgcaccttcacatcatcgtaccttcccagtctcgttagatcatcgtataataccaaggctcgcaaatcagcgagttgctcttggtctgcctgtacagcttgacgcattgttattgggttcatttgttgaattcctttccagtggagaaacgttaatttttgaatgtcatatcgcactatagaacactaaaaatcatacctttggcaactcacttgagcaacatcggattttagaacgcactatatttttcaaacatactgaactcctcaaaaaaataaaaaagcccaaaaaggacggtgcagtcttgcttataccaataagcgaacctgcagccatcccttctgggatgtagattattatagaaaactatgaaacatgtgaagcttgtgccgtatgttgtaatgcttccagacccaatgctaacgtaccacataggcctgcatgctggcccaatccgggctgcacaatatattggtcgatatgttgcgtgattggggcagcatttacataaccattgagattccgcactacctgctcccggatcataggaaacagatgatcttgctgcatcacaccaccacccaagatgatcttctgcggcgaatgaagcaagatggccgtagtaatcgactccgcaatgtaaaaggattcgatctcccacgccggatgatctgccggcagttcactgccagggatctgccaacgagcttcaatggctggacctgctgccattccctccaagcaatcgccatgatatgggcataatccggcaaagcgatcgtctggatggcgtcttgtgcgaatatgtccaccctcgggatgtaacaatccgtgtactcgtttgccccctgccacaagtccgacaccaactcctgtaccaatcgtgtaatatacacagttgtccagtccttgcgccgctccccacgtcgcttcaccgagcgcggcagcattcacatccgtatcccatccaaaaggaaccggaaattcatgcttcaaggttccaaccacattacagttttcccacccaggcttaggtgtggtcgtaatataaccataggtgggactatccggttgcagatcaatcggaccaaaggagccgacccctatggcttccacatctttatccctgaaatactcgatcaccttggcaagagtgctctccggatgttctgttggaaagctgatccgatcttcaatctgtccatgttcattacctacaccacatacaaactttgttccgcccgcttctatcgctccaatacgcatcgttctgggctcctttccttcattcaattaacctttagccttggttgatgatatctcatagatatgaagtgaagagaagaccagatctgtattttcggcatgagcagagatgccttggcaatccgcatccggatagatcagatccgtaataaccgcctgaccatcatttgcaaatacctccacagatgaatgatctacaaagatacgcaaactttgatttccgttcacttcttttaactcagctgtatgacggctcaggaaaagttcatgaaaattgccgatgcccgatcgactacgatcaacgtacacttcacttcggatcgagtctacaccaacgaccgtttcgtgatctgcgctgcttcttagtgcaaaatggaacgtctgatcctgagcccactctgcatggatctcatagttcacgagttgcaatgcgttcaactgctcactcacttgctgaatcgaagcatcctgtagggacaatactggcgtacgggcttgctcaagttcacgtgcaggacgttgaatcaatataacttctcccgctcttgtctccagtgtcaactcccgggcaatggtcattgctccacggtaatcattggttggcgtctggttggcatacatccagttgctcatccagccgataatgagacgtcttccatcttcctcaggaacgtcagaccaactaactcctgcgtagttatcccgaccataatcaatccagcgaatcgtctgggatgcctcgtctgggacaaatgtagttccatcaaaatctccggtaaaatattgtgttctggagccttcaataaaagcaggatctgcaccgatgctaacgagcatcacccatttctcgtgccctgaatctccatccactgcaagcgggaacaggtcggggcattcccacacgccatcgtgtgaaccaatcccgtctccaaattcacttcctagcgtccaatccttcagattgggagaacgatacagacataccgtttgaccacaagcgataatcataacccactccttgctctgctcatgccagaacactttgggatcacggaaatcaacaaaggactcatgctttaataccggattaccctcgtacttagtccaggttctgccgctgtctttgctatacgccagactctgggtttgtatggcatcttggtttttaacttcaagatgatgggtgaaaatagcaaccaatcctggctcaccctcaaagaatccggtcgtattattccaatccactacggcacttcccgagaatatagtgccattctcatcggggagtaaagctattggtagttcctcccaggagatcaggtccctgctcactgcatggccccaatgcatggggccccatgtagttccatgtgggtgatgctgatagaacaagtgatactccccattgaaaaacaccatgccgttcgggtcgttcatccacttctcttttggtgaaaaatggtattcatttctgtaatcttgtttaagaattgtcgacattatggtttctcctccgtacttttctttatttgttattacggtcataccccgcttgtttaatctgtagccattcttgcaatccaaggcgatccaactctttcaagtaagcatcccattcctgatctattttcccgttctgataccattctgtacgcagacgtaacacgtaggcgaagagatcggtttcaatcgtggacaagcgatccagttcatcaatggagaagaacacacttggatatacgttctccgctttcatatgcggaaccataaccttgtcgagaagttccatccgccaagccgcatcttccggtttggttgtgtatttgtcataataactgtcgagtatggccaatggtccggcgatactggttttttgtctgagttcaactggtgcagagccctccagcggaagatgtttcagcatccctttggcttcatcgaattcaaaaatattttgctgactctcgtctccataggtaccccagttgttctgcacagattggagcggatcgtacagttggtctacccacttcgctgtcgattccaggtttttattgctgctggtaatgaccatgcgaccacgatcaagcccaatcccgtttgttcttgtgacattgacctctccgttaggcccggcaaccggaggcagaacatcgtacgtatcattcatgcctgtaatgttagccttatcccatgtgaagtacatgccgtacttattatccttgcctttcgcaagatacgtgttccaatcctgctggtacgattcgacatcgatcagcccttctttaaccagctcatgaatgtatttaaccgcttccttgtagccttcatcagctgccgtgaagaccactttcccttcattggttaccacggtatgatcccagttctctccgagtccaaatgccgcaaagagaaatgtcagatcttctccgcccggtttgttaatgaaagataacggaatttcgtcggccttaccgttgccgtttggatcttgagttttgaacgcgatcaatacttctttcagctcttcggttgtcgttggcatcttcagtccaagcttgttcagccactccacattaatccagggcaagttatccactgcctgaatccgttgtttgccacttccgagttcttcaatccatgggaatgaatagatatgtccgtctggagccgtgatcatgctcttgtattcgggagcttcctccagcacctttttcagattgggcatgtgttgttcaatcatgtcttcaagtggaatgatcgccccgtccttcgccagtttcaggagatcataatccccgtaacctgcatcaaaaatggcatcgggcaaatcaccgctggcgaccgccaggtttcttttttctgcaaacacatcactcgtatagttcttccagttgatatgcacattggttttttcttcgagtcgcttgttaatcagcttgtcgtttggatcagcgggagccagcggagagctctgtgttataaaattcaatgtcaccttgccatcaggggattgcgcctcacttgccgcgccgccgcctccacctccgccacaggcggttagaaagagcattgcagataacatggaaatggacgccgttgtaacggcttttctggacttgtttacttttttcataataatgacctccatgagttggattggatcaacttactgtatcgcaggctgttcactatttgagggaaccgaccatgacacctttttcgaaatacttctggaaaaacgggtacatgatgatgagtggcagactcgaaatgacaattgctgagtatttaatcatctcggagagccgtttcagttctgccatcgcgagctgatcactgatcatgcctggtgcagcctgattctgaatcagaatggaacgcagaacgagctgtaacggatgcaggctcggattatcgagatagatcattgcatcaaaataggaattccattgcccaacgaacgcataaagtgcgagtacaaaaatgatcggtttcgacaacggaatgacgatctggaagaaaatcttcatctcagaagcgccatccacgtttgcagcttcttttagctctcgaggaactcctttgaaaaaggttctggagagaatgatgttccagacgttaacggctccagggatgatgatcgcccacaccgtatccagcatgccgagattacgtatgagtagataagtagggattaatcccccgccgaagaacatcgtaatgataaagataatcatgaaaaatccacgtcccgcgagcctatcatccgacaatgcataacctgcaaatatggatacggtcacggtgatcagtgcaaaggaaaccgagtacaatacagcatttgcaaacccccggatcatggctggattggacaaaatcatctgatatccgtccagactccagtccgatacattaaaggacagtccacgattcagtaacaccgtggggtccatgaatgaggcgataacaatataaatcaggggaacaaccacaaccagtacagcacaggtgagaaagatggcattgagtgtgaggatcaaccgatccattcccgtgtgtttaacaaccatggataatactcctttcctaatagaggccttcgccttcattcaatttcttcacaatcaggttcaccgtcaccagcaaaatcacattgataaccgagttgaacaatccaactgccgcagaataagcgtaatctccagactgtagtcccaccttgtagacatacgtggcaataatctcggaggaaggcaggttcatggacgtctgcatcagataggccttctcaaatccaatggacataatcccgccagctgccaggataaagacgatggccataatcggacgaatcgttggaaggtcaatgtggcgaatacgctgaaggagattcgctccatccagattagccgcattgtgaagctccggatccacattggccaaggccgcgacgtatataatggaagcccagcctgctccggtccagatatcggacaaaatgtagatccagcggaaatattccggttcagacatgaacataatcggctgacctgtaatccatgtggctaattgattaatcggccctgtcggtgagaggaagatgaacagcatacccacaacaacgacaaccgagatgaaattgggtgcgtacagaaacaattgaatatttttcttgatgccagctttgcgtacctgattcagcatgagtgccagtaagatgggcaccgggaaactgaatatcaatcccaaaaagctgagtttaagcgtattcattaaaatgatatcgaaattgggtgaagctataaatttctcaaaatgcttcagtcctacccaatcactacccatgatgcctttgatcggactgaaatccttaaacgcaatgatggctccgtacatcggaatgtacttgaagataagagtcaaaattaaggctggtgcaagcaacatatataaaaagtaattttttttgagctgctgtaacctatgaccgcttgtcgtcctcactttcagtacccttccttcgccctttttgctgtcggctatgttatccaacacgatacccccgttcattctagaagttgacaattgttttcagtaagggctttcaatatttacaattgcctatttgataatttacaatttatcaggtttcaacggatttagtcaatacgttttgtaaaaaaatatttgtgcatttgatcatttcatctttgcattaatgtaactaaagaggattaattttgcatatatacagctctgaatcgttaatagccgcatagatatttctatatcatgactgtaataaatcatcattgttacactagttaacgaaacttctggaacaattatgaaaatagaattcaactatctaaatgtaaatgtaattgtgcatttgtaaaacagagattgctatttgtcccgttctattatacatttgacttagagaagaatatggatgactattgaggattagaggtgaagcattagatggcaaaggaaaaagtcacgatacaagacatcgctgatgctttggggatctccaggaatacggcttccaaagcattaaatgatagcggaaacatcccggatgaaacccgaaatcgtgtaattaaaaaagcaattgaacttaaatataaacagtttgcctatatggacaatgagcatgttctaaccaaggctccgggcaatatcgccctgttaactgaaaacctgcctaatacatctcactttggttcattgttaatcagcggtctggagaaaagaatcagtgcggagggatacaatctctcgattcatatcgtgcgtgaagatgatcaagatacacttacacttcccaacaattttgatatagccaaagtagacggcatcatttgcattgaattatttgatctggagtatacacagctgattaccgatctgggcattcccaccatctttatcgattgcgcttccaacatatgttatcccgaattcaaagcagatctgttactcatggagaatgaacatagcatctatcagttaaccacaaaattaattgagagcggctacacaagtattggattcgtcggagattacaatcactgcaagagctttaatgaacgatgggttggatatcagcgtgctatgctggaggcggggttgcaggtggacctgtcccattgcatcgtagataatgatcgcctgtgtttctccaagccaggatggttgaaccagcgagtggcagagctggcctccctaccttccgcttacgtatgcgctaatgacttcattgcagttgatctgattagagcgttaaaagacagaaatgtcgctgtgccacaggatattgcgatatgcggattcgataatgcaccccaatctcgaattattgagcctgcattaacaacggttcatatttatagcaatgagatgggcattaagactgcggagatgctgttatcccggattaatagcccgacacagccgtatcagatctcccacattgtgaccaaacccatcatcagggagtccacaccagcaatcatgaccgatcactctcagatggttcatagttctgcaaaataaaaaaacgtatgtctcacgagtaacaactcgtgaaacatacgttttttggtggtttcgattgggttggatgagcactatatcctatccatcgcggcctagataaaaaatcatctcgcgattaaatctctttcaagatgccttttacaagtccgataaaggttgttttcacttgcgcagccacttcaataacttcatcatgacttaacggctgatccagaataccacaggccatgttggtcagacaggaaatgcctaataccttcataccgccatggatggcaacaatggcttcaggtaccgtggacatccccactgcatccgcacccatcgtacgaatcatgcgaatctccgctggtgtctcgtatgccgggccactccaccatgcatagactccttgctgcaggccaacattctgctcttctgcaaccttaagggcaatactgcgcagttcgcgattgtatacctgtgatacgtctgggaaacgaacacccagttcggcgttattcggccccatcaacgggttattacctaccaggttaatatgatctgtaatgagcatcagttgacccggctcaaagcttgtgttgatggctccgcatgcattggtgataagcaattgctcgacacccagcgccttcatgatccgaacggggaaagtcacttcgtccaatgtaaaaccttcataataatgaaggcggcctttcatcgctacaaccgttttgcccatcagttcaccgataaccaattcattggcatgaccgatagcctccgattgggcgaaatacggaatatctgtatacggaataacggtcgcattttcaatctcgtccgcgagcgctcccagtcccgaacccagaatcatgcctacggcaggtttggtatggattcggtttaatatgtaatctcttgcttcctgaatatgtgcggattgatgcataatgatatcctcctgatgatctgaattgagttaacaaaaactgagttaatgaggtgctactcatcaagtgtaatgaacaatggtcatgatgtaaatggaagctgttctatatacaataaaaaaacgaccctatgctccagaatcgtttaaaaacatggacataccctaatccaatgtatatttgtttctacttttcatgtaatcgattgtcataatcagcaacagcatgaatgtagcaaacatcagcggtttggcaaaagtaccttcttcaaaaatataaaaactaaatataaaatttccggcaaaagtaattaaatagtttcggatgcaatccatcttctcatctcatttcaggaaagaatttggttcaccatttcttcaaccctatcacacaatcccatttaataccatatttatatttttatcatccacacaaatcaacacctctatcatgcacgagatagccgtactgtacaaactatattgactacagcaaaaaatcggccacatcgtgaccgattctctccacttccctgatgttcaggacatagggttaatgatacgccaaaatgattccttaggctgcaactgctgatcaaaaacaaagggccaatttttgcgtccgcgtaccgggaaatggtctaaccaggtataattgtccgctactccccagaacgtcacagaggtaatggatgatttatactcacggaacaaattaaagatttcttcatatcgacgctcctgtagctcagccatctctgaagttggcgcggtgaggtccgttcgacgatcctcatgacgaaacacggacatatccagctccgtaacatgcaactgcacatccagtgaagcataacgctcaatagccattcggatctcctcaattgaaggaccatgaatattccaatgcccctgcaacccaatcccgtgtacaggcgctcccttgtccagcaaagaccgaaccagattgtagatcttctcccgtttgaccggatccgtctcattgtagtcattatagaaaagaagcgcatttggatcagcttcatgagccatactgaacgcttgcagcaaataatcttcccccaccagctctaaccacttcgtgtcccgcatgaacaggtcggtcttatcttcaacagcttcattgacgacatcccacgcatatatttgccccttataccgacctactaccgtatcaatatgttgcttcaagcgagataataacagctctctggaagcgggagcacctgaggtatcctcaaagacccatttcgatgtttgattatgccagaccaaagtatgtccgcgaaccccaatcccttgggcaacagcaaaatcaacaattttatccgccgcctcaaatgaataacgatcctcttccgggtgaatttcttcgaatttcatctgattctcagccgtgatactattgaagtgtttggcgatgaaatccgcttcggactgcaacattctggtatgtacagcagcacctattttgaacgtattagcgtacgtagcatgtaatgatggaatttcagttggcatttacaattcctccctgccagtttttatccatcatatcgtttgttgaatacgcttacaatgaacaaattatacttcttccccctcatatttaactatttatgatcctcggccctgtttgcacaacaaaaacacctccacgtatgtccgactgctcatctaaacagaacatttctcggaaggtgttttgtgatcgggctgttcaattaaattcaactcatatacaaagaggatatgaagccttacagcttgtccacctgtaacaaggtcacctgtttcactgtgcatgccgggttaatttgttcctcggacagaatgttcagcttgatgaggcttttcagcttatggctgtctaccttggacaacaatcgccagatgtccgggtctggaagagaagcatacagcttctgatcatcgtattccttccggttctgaagcactgttttcacggtgtaaccaccaacctgcgtctcatacaccccttgttctgcacaatacgcgacaatctcatctcgtagtacagacaactgctgctcaatatctttttgctgctgtttcagttcaaagtagatttgcactttctgctccatatcgatcacgctcctctactatcatagttatgcgaggatcgctagtttaggactggctgtttattttatttgaaaaacgctaccttactatgagttaatcgtatactgtcgtcattgtatatccccgtattacgattacagcagattctcatgcaaatatggattatggacagccatgttgtgcacccgttgcattacatctggccccatggggacatccccaacgcgctttaacagaatccagcgaagacaagctacagcttcaaaaacctgctcctcttccagcgtgtacgtataacttacagaacgtgcaaattgagcgcgatacatctcgccataactttccccattatagacggtgatcagaaacacagaccatgccatatcgtaccttggatcaccatactgcccattagtccaatcgatgatggtgtaatggtcgttcatctcaagaatgtttcccagattataatcgccatgaatcaagtggtcctgtctgatctggacctgctggatcaagtttgccagaagatcatttatatcgtcatgtaactcaatttgaggaaaaaagtattgaacaaaatcgtacctgaatatgtattcttcatctgctccagtacccacttcattcaccggataacgatggacctccattaatcgttcagccaaatgtgtcagtttggtttgtgttaattgggtacccggctttccatcatagctcgttaacagcacttgattctcttgctcgtctaatccccaaccgtagggtttggaaacacgaattccactttgataaagcttggacaataatcgatattgtttggcgatatccggtttagaatccttgtcccaaactttcaatacgtaccgctgacctcccatttcgattttcatcacagttgcttctagtccaggtgacaagggaatgatctgatactcctgtttaatcacctgctgaatacgttcatccagttctacccaattcacctggctatgttgaatcatcacttctcctccgttcattcatgtcatgccgctctctccctgttagtcaggtataatcaggcctttgccaatgacattggcggatactggctgtttgcccaattctctggcccataccgacagctgtcccatatggtgaatctcatgggcgatcacatgtcgcataacttctccccatgaatctgtactggccttgccagctgagcgatgatcaatataagctcttttttccatactcgaatcccaggctctaacaaatgcctccacatcaggacgtaacttgcgatcgagtcgccttaccgcctcaagattctggtagtttgcaaaatcttctgcatcatccggtttgccctgtagcaactgaagccagctccactctacatcaatgatatgaaataatgtttgtaatatgttgcctactccgcccgtgcgaggccgaagcaattcttcaagcggtacatcttcacaccacacataccattgctcacgcaccatccagttataacgaaagaatgtttccattggtatattcccctttatcgatgtttttcatagagatttgatcaattctgtatgggcaaaggtatcctccgaatgtttacacttaccactccgatgacagaacaaccttccgatcgctgttatccccagatttttttgattcattttataatgggaaactccggggataagcctatgcttccgatgcagctttctttcagaaagctattaggcgaacacttcgcttcttcaggttttttctgtcctctccgtttcgtgtaaatattctgttgaatttatttagttaatttcttttttatatacaagattacatgaatacctgcataaataaacaggacattgaacaaatatagaagtacatttaaatagataccagatataaaccagattgttccctcagaattagcataatgataatccgtaaagaatcggagcgggaaaccatactctgttcggagcggtccatcttcagtatgtaaagttccaggaatacataggatggctaatacagcaagccaggctgatagattcattattcttttgttaatcgtcaatacatctcccccttattcaacactaacggtatcttcaccaaaatacgtcccttccaacttttgatccaaaaagtctcttaagtccttttgatcaagtatatatttcgaatctctattaaatctgctttttgtggatacaataatctgtttccgattgtattgaatcgtaactttagcgttatgctttaatttcaaagcaattcccgcactaatgcttcctgtgacatcatctactggtattttggctgattccggggctgcattcagccagccgactatacggctaatgtcttctttacttaacgtaacattgtcaatgctaacgtgtgctacaccgtcacctgtcctggtgtacacgactatactcatctctatgcttatcacttgatttcttgaaatcggcttatttggatcagggttactcgtgattagaaaatacaaaaacatgattgccgcacctatgaaaaaccagaatcgcctacgttttcctagcattacagcgcattctccatatccaccacgttggcaaacagtctcagtaccgtattgtgatgtgcaatgatctgctctgcttgaagcgtctttgaattccatgtgctgtgcgcatcttgaatcagattgaccgtgtaacccagactgaacgctctgcggcaagtcgtgtctacacatacctcagtctgcatacccgcgagaatcaactccgtcacgccatcttcttgcaatttcagatgcagatcggttttgtgaaacgaatccggtgtctctttttcgataacgaggtcaccagcactaggtgcaatggacggatggatgtcccaccccagtgttcctcgttccagtggactgcctggcccttcgcagtgctggatatatatgatggaatgccctgcttcacgggccctggcaattaacacctggatcttctgaagcaatcgttccccctgatatacgggatctgcttcatcaaacatcgctacctgtacgtcaatgattagaagtgcacaatgcgttgtcattttgctttcctcctgataaatcaatttaattcaactcttttttcttcgtacctttaacaaaacttccaatcccatatcaatcagtacaaataggatagcggcaagaacgccaaataaggtcagaactaatgtctctttgaaatccaagattgcttctcctgcgcccatgaccacataataaatatacatacctagaactccagcacatgcatagcctaatatcctcgtacttagatacaacacatgattagggaattgtattcggctgagcagatagtctagcaatatcgataaaggtagcccgatcaacaggatcaagggagtcgcgtatatcagataaataagaatgtaaaaatcaaaactgtaggtttcattcatcgatatgagacttgcagccaaagtaaaacaaatgatggttagaacggttgtcatcagctttcttcccatgttcatctcatcactccaatacagttatctctattcattggatgtgctcatgcgtcagattttgccggctgccatccgatttcttgagaccaacgatttgctctctgtaatatgctccacaccattggtccttttccttcaacatatttgggacgctgatctttatacaatgacatgagtctgtgcttttcttctgcatagttcaaacaatcttctggatgctcccttaaatagtctctgaacagcaaggtcatctgctcggagaaactgcctacttgtctaacgtgtatatgtatccttctgtttccgggttcttcacgaaagtaacgtttagtcttatctggattttctgctctgaatacaaatccgactgtttcaatctcatgtttgtagtccaacagattctcatactgggaaacagatatttgtatatctatgatgggtttggcatctattccaacaattgaagtggacccaacatggtcaatccgcacggccttttttcctaacgcttctcttaatttcgaacccgtttcgagaaacaaatcacgccatgccggatcatactttgcaattctccattgatcctccatacaactcctccttggttattcaatcaagctatataattaaataacacgttcttttaaccttttgttacatgtagattatttagtgatgccatatagagatcatgcaaaatcatcattgtttatccccagttctatttgttttttggattcaatcatgtattcgtacacatcatcaatttctgttatacctttaatattgtcttttaacagttcaataattaaattataatcactctctctcatccttatatctttcaaatagttatcgctatagtcatccataaaatctaatttgttcttataaaatcgaaatctctccaatacatatacttctttaagattaataaataatgctataaaatccttaaggtttctggccactaacgttacttgattcccaaatgccgtaggttgaataaagataataggcgcttcttccaaatcactaatggatctgttgaacgtgaaaaaagcaaaatggtcaccatctgcccctgttcttccaaatatgatggcatcatctggcgtacaatagtatctatcctcatcattgttaaaactaatataaaaacccatataatcttggagggttccatcatgttgtttacgtaattccttatctattcgaacgatgccttctaaggatgcgggcattttataatgtactcccaagtttaaatacctctcttctgttagcgtttattaatatatttatattttgacacaaattcaaaaaaagagaaggacccttaggccctccccttaacttcttaatgatagtcacacttgaagtttgtaaactcagctacagcatcttcacccgttgtgtatagaccaatgagtacacctgtaaaacctcctgccacctccgaggataggtatctcgtctgtgccgtgcctagcagaatctcttcaccatctgtttgaaacaggaaactgtagcgttcttggtttgagcggatcaccagcgttgcatgctgtttatttcccagatccacttcatgttctctcgatttgatatcaccgatatttagacgctcgatcaccttataaccgtcctgctcctgacgaatagccacttcataatgatgattctcatccatgtagatcgtgatcccggcttctccactcctcagactgacatcaactgaaattgttgcattaaagtctttttgacgtaacccaatgaacgtcggggatgccggaacgtccagcgttacatcggttcctgttagcgtaagcttatctgattcaagctgataatgctctgcatttggatgacgaagataacaccagtcgaggtcccagtctgtattttcaaacgtgtaattcttcttatcctgctggatcaccgtatccgggatacgattggtctcaaaactcgtcagtgttgtgccttcatgcccggctgtaaaccatccgtcttcatcaaacgtaatcggagtcaaaaatacttctcggcccaaatgatggtacgtagcccatctgccgatctgtcggaatcccaagtggaaaagccaccagttccccagatcatcctgaaccagatcaccatgcccgacaccctggagctcatacccacccagattacggttggttagaaccggattgtgcgcataggcttcgaacggtcctgaggatgaagttccccgggcatacgttaccatgtgaccatattcggtgccgccttcagctgcaagcaggtaataataaccgttcattttatagagatgcggactttccagatatcgtccacccgttccgttccatatcgaacgacttgggctaagtttgcggccagtttcaatctcaagctcgcactgaacaattccgccaacgccttcatcatccaccccgttactcataaacaaggtttttccatcttcaaaatacaaatcgggatcaatcccgccttgatccacataaataggctcagaccattctccgtaaatatcgtccgtccagacatagaaattctgatgcgtcgtatcattcgttgtgaccatataaaaacgcccgttattgtgcctgatggttggggcaaatacacccccggagctgttcaccgtctcgagctgaatctggcttttacgagtcaggcagtgaccaatctgcttccaattcagcagatccttgctttcaaagagcggtacgcacggaaaatattgaaaagaactgcacaccatatagtaggtatcgtgcaccttaatcacactagggtctggataaaaacctttcacaatagggttattgtatttcattactccactccatctcttatcataaaattcacaaatataagaattcaactttgtaacaactacaaaaattaaacaccatcgggtgtaaacttgcaatgaatctgaattgcatcttggagttaattttattaaattaatatatatgtgattttagaagattgaggatagggagttgtacagatgatcaaagcaaatggggagccccagttccttcctttatatgaggcgcttgcaagcgaagtcagatggagaatcatggatatgattgcagatcgcgaaatgaatgtgaaggatattgccgcagtattagagcttagcccctccattgtcacgatgcatattcgcaaactggaggatgcgggtctaattggcagcagacgagttcggatcaacggagggacgcacaaattatgttacctcaagcaaaatcagattgagatcgagctgccatccccaagccaaacttcacgaaccagtgaacagacgatagccgttggacactacactgcttttgatattcaccctacctgtgggctaggaacacttgagaaagaaatcggcgtatgggacgatccacgttacttccttgatcccgagcgggtacacgccgctatcttgtggtttgggaagggctatgttgaatataaaacacctaactttgtactacctgatcagactaccaatgctatcgaaatttcgatggaactagcctctgaggctccgggattgcgagatcattggccttcggatattcgtttcaccttcaacggcgtttctctcggaacgtggacaagccctgccgactttggcagagcagcacgcgggaaatatacgccggaatggtggcatcgtaatgtaaatcagtatggattgttgaagactattcgtattgatgcctacggtacctatatggatggtgagcggatgtcagacgttactctcgcggatattaagcttagcgaaccgttctggacgcttcgctttacagttgacgaggaaagccccaatgtagggggattaacgatctatggtgctggttttggtaatcatgatcaggatattgttattcgtgtattgggttaaagtggctagctgtgctgcacaagaatcctccctttcctgacctacaggagagggaggcacccgaaaatgctgctccttagcaaattttaaagcacaagcctaatcaatccttacctttgctcttttaacaggtccttaatttcccttaactctgataatatttctttggtgtgctggctatttttggagttatctattccaactttcacaacataaataccgaggaacagatacaccaccaacataatgatcattcccaagtacatctctcctttccaaagtagcagcacattgctacgaacgttcactatcctctctctccaactgattcccatggaatgccttcaaaatagatggcaaccttcattgtgactcctcctcaggaatatacatcgtctgaatctcctgcacacccggaataaagcccagattcagatacacggactccgcatcatttccttgcatcacatacaatcgtagcacgggatacttacccttaagttcatttaatgctctctgtaacatctgtgtagcaagccctcttcctctatatgccggccgaacacctatgctatacacagcagcctgattatcttgcaagcacaagcgacaatttgcaataagctgtcccgtttccttgtcgtatactagagtggaagcttgagttagaatctcattggtataattagggtcatcgcttggtataaaatctgcaagcgtggtatgttttcttcgtgtagcttcaagacttcctgcaaaactctccaggtcacattgagcaatctcatcttcattcacatattttctattgccggtttcactttcaataatctctggactcttcacagttaccctgctgtcccattcgatttcaaaatgatctgtagggcgctgcatccagcgacatctgaactccactggccagaatccagctcgtgcgtatagatcaacttggtctggaagaatctcaaaggtcagaatacgtttggtgcgatccgaccactgtaataatttatgcttcagaagcttcaatacctcaaagcactgctggaatggcgggataaaaaacaaatgatacatctggttaggctccattctcacgccacctattttgctttcccccttgtaaatccaatacgcactgatcttggaagaactaaactcttcttctctgaaaaatccgacataacgcatatcataataaaccgtgcaatataatccccattcagcaaaatcagctttgcgaatcgaatattcatccgacagattatattgaagaatatctgtagaccactcagttaaacccatacgtaattcctcctcagttttaattaaatggcaagcaatcaaatcatttttctatacgccaccccgtgaacatgaattaacacatgctgtgcctccatacgttcgaagaaatccaacatgtccttaaacggattctcgaaatacgaagactatcaagaaaaacctctaatgtctgccctgtttctgtattcttgaacatacagtgctcgccgtgaacatcaaaataccaatttcccgttaattcttcttctccgtggattacatccgcattggtcagcaaatggtacgcaccttcgagaatttccgcccgatcaggctgatcggtttccaatatcagttggtcgatcaattgccgcgcgattctttggtacatatccatcacagccaataattcttccgtgatttcctgggttatcgccttcataccttcatatccttatccgggtatccaatttctgcaatttcaccttcgatatcacttaatttcagttcatcatttaattgctgtagtaagacctcatcgatcggcttcatatcaaatacctgttcaaccagtttgatatccaacgctatctcgtagtaatcctgtgcccaagcatgataatatttcgcgccgcctaccaaaatctctaacagttcgtattcatgatccccaagctctgtgcccgcagcccacccttcctgatccgccacactccaaatacagaacgtcgtctgatccattacaaatgccggctctaccacaaaagtattaaatgcttctggaacgctttttaccacctcactgctatcaaccttatgctgaagtgtatactctttatcaaagcctttaataatcagcccattcggactgaatattgcaaaataatgatctccttgcccatctctcatggatgccatttgctcattcgtgtcccactgggaattatacgagtaatacctgtactcccattccggcatcaaaatggcatccaacatagctgctgcctttagaatctgtttgcattcactaatgtgaggaattttatcgataaagttaagattacccatcgtgtgatattgccccttttaccctttcaaaggaataattagttgcccgaccttgcggttagcaaagatacgataacgtagccaaaaagttgaaccgtaaatacaatgacaacaaactcaaccattatgctgttcgctgcattaaaatcattcacaagatccacgaagatcttcccaggtcgggataatatatcccacgaattccaccgattaaatctaccaatgtagacccctatactgctcaatagcaaaataacaccgacaaccatcatactaatgtacttatttactaatttgtttaacattccgtggatttgaatgatcgaacaagtcgagagcagcaatccgatgatcgctacggcaaacgtcagggtgagtccgtaccaaaaatcaatattaacccaaaatctaacctccccttgagcatcaaaatatctgaatgaatgcagaatctccgtaaaaaggtaggccgcattgggcagaaaaaagagccatactccacacatcagccccatacatatcgtgctcgttgtggttaatttcttattgaatatgtatctaatgcaggatgagatgatgaagggtacccatgccaggaacatatcccaacttaaaaatcgatacatatttgtatctgtttgggcacgtaaatacatcacaacacctagacaacaaagagtagccacgagcaaagtaacgatgagtcggagatcttgaaccggatgtttattatctttcatttctttgcttctacttccttttccttgatgaatgttataagttataaatactttttaaatgccttgctggattctccgttgtaccccaatttcgtataaaagtgatgtgcttcgtttctggatgatccacttgtaagaaacaccttcacacaatttttctgctcacatacatgctctatatgtttcatcaattcagatccatatcccttgctctgcacatgttccgtaatgataacccgctcaactacgccgaatggtctattttccaccaaagcatccagacaaatatgtaaatgagccgtgccgatcacctgatcatccatttcatacacaaacaagaaactgtttgggttattccgaacctcttcaatccgttctgccagtaccttcgtgtttaagttgttcggcaataattctttataaagcctttcaataaccgctgcatccctagcctctgcctctcttatcatcaagcttcccctccctgttacctcacttgataacttaaaatgatatcaccgttgtcctcgaattcacccgtgtcctgaaatccgcaacgtttatacagcgcatttgccgcaatgttatgtggaacatgggatacccttatttgctggcagtcacttctctcttgcaacatacaaaccacttcttgaatggcaagtttaccgtaacccttcccctggtacttctcgtcaatcatgaagcgcagaatccagtaatacccgtcattgtagatctcgttatcaaataaaataaaaccgaccatctgatcctctgccaaaatgccgtatggtttggacgtaatttccttcgtcgcatgaatcaatgaatccgcattgcttgcgaccaaatccagctgatcttcccgtggtttaaggtggatgcactcaagttcattttctttggttataggttgtaacgtcacttgctccatacccacaatcctctctccttgcagcttatttactagattttcttgattaacataatctccagaggttgtgtatccagcaacagagctcctgcatcaacataccccagctttcgatagaaatgttgggcatgttcgtctgattgtgttgaagtcatcaccgtatcaaagccttgttgcttcattaaattttcccagtgatgcaccacttttttgccatatccgccgtttcgatagggttcatcaatccagatcatattcatgaagggaaggttgtcccaaaagtaaccgtacctcatccatccaactcttgatccctcgtcccataggatgaatatttctttctcactaatcttcgttttcacaagtggctgatggatatgccgatctctttcaatgatatagtcgtagtcagcttccgttgcgtattcaatcttcatttgtaatactcccttcattaactacgtccatcataacccaaaatgtggtatatgcgaacagttctttcctctttttctcccacgccaaaaaaccacggtttcccgtggctgcacccgctctatttccctcaatccgctgttgattcgctgaccaattgccccttgtaccatacggcctgccgcgcagatcgccgcgcaacggcttccgccgaacaactcgcatgcaccaatacaaaactcgcggtgtcgcctaccttcggccagacttgttcgccttgtgaatccagcggtgtaatcccgcctgttacccatgccaaagattgagacaaggacagttcgtcgctatatccgtacagttctgcgaatcgtcccgctttttcaagcatatccccattgccaaaaggagaccaatgatccgtcaggctgtctgtggccagcttcacgtttacacccatacggtggagcatgggaagaggcatcatcgttctgccaataggcaccgtagaagcaatgctcatcccaagcgaggccattcgctgcgccatgtcttctgcttcctggtgctctgcgcgggcgaaccagaacgcatgacttaccgtaactttaccctgaagtcctgctgcttcggtcagatttgcgagttccaacagcgtttgtttgccggcctgcccaccatcatgcagatgaatatcgatgcccgcctggtgctgaacagccagttcaaccatggcgttcagtgatttctcgatctgttcgtccaccgtatgaggatcaagtccgcctacatgcgttgcaccttccttcatcgcttggcccataagctccactgaatgggagcgaagcagtccatgctgcgggaaagccacgatctccgaagagattttgcccgaaaatgattccagagcctgccgcgtcgcttccagtcttttcaagccactgacgggttcaatattgcaatgactacgtacatgagtggagccgtacccctggatcaaggtcagaatactctccgcttgacgcttggcatctggcagcagtttgggcaacagaaccttctcttcttcaatacgttcgaaaatactggagatacgcttaacggctgtccacggcccatcgtagtaggttttgtccagatgaatatgtgcctcctcgaacgaaggcaacagcagaagtcccttgccatctacttgtggtagatcgctagacaatgggttgtttccttccacaatctccgcgatcaccccatcttcaatccgcagatgagcggggcttgtccgtgtccccgtcacctgttccccttcccgaacataactccgctccaaagtcacattggttaaccagtaggcctgcttcaacatgtcatcccccttttctcacccggcattaggtcccccggatacccattgatctatgatccatggtaccatacggtttcaccgggcaaaaatacgtaaaacgttggtgttccatatgcggaacgtttgtattactctacctaatacatgtaaaaaaacaggcacaatacgtgcctgccccgtccactcgccttaatcttcttgattacgcgagtttattaaaaatgaaatcgcgcatgccctccatcggtcacaccttcaatctgttcgatatccagcagtctgcgcttcatctccaggcctccacggaacccggtcagcttgcgattagccccaataatgcggtggcatggtagcagaaccggaattggattggctccatttgcagcaccaactgctcgcacagccgaaggtcttccaatcgcagcagctatatcaccataggtccgaatttcaccgtaaggcacacgccctagctctctccatacctcctgctggaagttcgttccgatcaagtccagtgggatcgcatctgtataagccatcgattctcctgcaaaataggactgcaaccagtccatcatacctgtttgtttcagagcatcctcattctcttccagttccacgccaggtgcaactttctgtatccagccgttccagtcctccagtgtttcgttgggcatgaccactcggcacaatccctcttccgtagcgagcagtacccatggacgaccgtccaactgcatcgtggtgtacatcaacttttttctcattcgtttatcgccctctccccggtagaatgcttaatgctagaactaggaggtaacttgcttcttcaccttacgtttcatactgcggatcatctgcttgctctctggatccacgcgataagattccgtgattttctgaagtgccttattatacgtaaaatcgtccaggctattatggtgcagataacgcatagtcacctcaggttgtttcacataagccattgagatggcccaagcaactgccattttcacataatacgcctcgtgcctaatctgatccaatgcggatagaacctgatcgatatatcgctcattcagataaaaattcaacagcattaccacaccaaaccggatttcatattcctgatcagatctcagatacggctgcaagaacgcccacatgggctccgaatgaaccttagtatatttcagtccagcacagaagctgtcacacaccgaccagttgtcaatcttcggtacaaatgtttcaatagcctttaacagctcgtccagatcagcctgtacatgtccaatgaccatcgcttgcaacatcacttcttcaaaatattcatcctctgctgtttccagatacgtgcgccagtccccggcggcaagctgcttggcaatttttcgtaaggctggcaaccttacaccaagtacattcgtgatgttgggaataagtgcggccgagaatttttgatactccggctcaaccatgctgagcaattgtgttctgatatctacttccactagcgcatgtcctcctcgtctgtttctgtacaacaagtatatacttgaagcggctgtttgtaagcccatatcgaataggtgagcaagattacaatattatttttggcgctccctttttcccttcgttgtttgactttcaacccattccgtttaaaaatatgaagttgatcattcagaaaggagtgtcgatatgaacagacctcataccaagaaagatttctccgtggaggagatcaccgaacaactcgtgcaacatgtacaatcccggaaccttcccgatttctataaattggtgaaagaactgcatccctacgacctctcacttgtatataaaaagttccctgaagaagaaaccaatcggtttctgctcctgttcaaacccgatgctctggcggatctcgccgagaccttgaagctacacgaacagattcaactgtttgaacgacttgggccggaacgaacacttgaagtcatgcagcagatggacaaaagtgatctgatccggttcatgcacgatttgcctgccaaacgcagagaagaattgctatccaatatgaacctggatcactctgccattatccgctccgtgcttaattacccgccggaaacggcaggacgcatcatgacagatcaatatcggaccctgctcgctcatgagacagccaaggaagccttacgacaatcgcaaggtaccatgcatatctcagcctccagttatctctatgtaaccgataatgaaggcaaactggtcggtgtcgtgagttatcgatcccttgccttggctgacgataagacccaggttgaagaactgatgacccggcgggtgatccatgcaacggtagatatggaccaggaagaagcagcacagcttctacagcgttatgagtttattgcacttccggtggtggatgaaaatcacagattatgcggaatcattcagatggatgatgtcatcgatattattatggatgaagccagtgaagatttggccaagatggggggcggcagcaaggatatcgactttgataccaaaccactcgtggccgtcagacgcaggcttccctggctcatcttgcttctattgattggtctaatctcgggaagtattgtggatttctttgaggatacactcaatcaggttgtagcactggcatttttcatgccgatgattgcaggtatgaccggtaacacaggaacgcagtctctggctgttgtggtacgcggactgatcggacgcaaactcgacaaagccaccgtactcgcactgattggtcgggagatcaaggtaggcatcatgattggcttggtatgtggattactgatcaccgtcatcgcttatttctggcaaggggactggctgctgggcgccattattggggtatctctgttcctcactctggtcattggtacactgaccggtacatgcatcccgcttctacttagtcgtttcaaagtcgacccggctgttgcctctggcccattaatcaccacattgaatgatatcttgtccctatttatctattttggcatcgccacacgtttcctcgatgccttgatgtaaatgagttgggcatacagcaaaacagacctgatcctaagatcaaggtctgttttttcattttatcaagtgctacgctgatcttttatttttattatagatatcaaacgctacagcgagcagcagtaccaatcccttaatcccctgttgccagtcaataccgagaccaatcagggacatcccgttattcagcacacccataaccaaaccaccgatgatggcaccaaataccgtacctatgccccctgaagcggaagcaccaccgatgaagcaggccgcaatggcatccagctcgaagttggtacccgctcttggcgtagccgcattcagacgtgcggcgaagatcaacccggataccgcggcaagtgtacccatgttcacgaaaacccagaaggttaccttttttgttttgactccagacagacctgcggccttctcattacctccaagcgcatacacatgccgtcccatgacagtacgattcataacgaaggagtacacaacgatcaggacaaacagcaggaccaggatattcggaatacctgcataacttgcgagtacaaacgtaaacagatttgtcacaacagccaccacaatcaacttgagcaaaaacagtccctgtgacacgacttcaaatccatattttcgctgggaacggcgttcccgcaattcattgacaatgtaccagacagtgagcacaagacccacaatgatagataccagaccaaaacctgagaattgaatgtccgccaggaagccagagcttattttctggaatccacccgggaaaggagagatcgattgcccctccagaacaatcatcgttaagccgcggaacagcaacatccctgccagcgtcacgataaatgccggaattcgcacataggcgatccagaagccttgccatgcaccgatcaaagcaccaaccagcaaggaagcgatgactgcaagccaagccggaagctgccaatcaaccatcataatcgcggcaacggcaccaacaaaggctgcaatggaaccaacagacaggtcaatatgcccggtaatgatgaccagcaccattccgatcgccagcaccaaaatgtaactgttctgcaaaatcaaatttgtaatattaatcggcttgagcaacagcccgcctgtaagtacctcgaacaaaagcataatcactaccaaggcaataatcatgccgtattgacggatattatttttgaacagttttgttatcatttccatgcttgccgcctccagacttggtcatatatctcatcaacgtttcctgcgatgcttgctcccggctgacttcaccggtgattcgtccggcattcatcacatagatccggtcacacaggccaagaacctccggaagctcggatgagattaccagtacgcccttgccttcagcagcaagccgatgaatgatcgtatagatttcgaatttcgctcccacatcgataccgcgggtaggttcatccaggataagaatatctggtccggcaaaaatccatttgctgagcaccactttttgctggttgcctccacttagattaccggtcttctgcaaaatacttggtgctttgatgttcatgcttttcttcatcttttccgccaccagtacttcttcacgctcgttcactactgcgtttcgcgtcagcttgctcagacccgttaaggaaatattgcgcttgatgtcatccatcagaatgagtccgtattccttgcggtcttctgtcacataagcaaacccgttctgaatggcctccgtgacggtattgttgtggatcggtttaccattcttaatgagttgacccgaaatattccggccataggatttgccaaagatactcatggcaagctcggtacgcccagcgcccatcagcccggcaatacctacaatctcaccacgtctgatattcatatcgatctgatccagtactttccgctcggcatgatgttcgtgatataccgtccagtcttttacctctaggataacttcaccaatggtggcatgacgctccggataacggctggtgagatcacgtcctaccattccgctaataatccggtcctccgtcacttcttccttcttcatatccaacgtctcaattgtcttgccatcccgtaaaatagtcacggaatcggaaaccttggatacctcattcagcttgtgtgagatcaggatacaggcgatgccctgtttcttgaattccagcatcaattgcagcagattttcactgtcgtcctcgttcagcgcagcggttggctcatccaaaataagcagccgcacctttttggagagcgctttcgcaatttcgaccagttgctgcttgcctaccccgatgctggataccaacgtgtttggattttcgctcagtcccaccttcgagagcagctcccgtgtacctacaaaagtttccttccagttgacaattcctctgctcgcacgctcgttgcccagatatatattttccgcgattgaaaggtagggaatcagggccaactcctgatggataatgacaattcccagatcctcgctctgcttaatatccttgaactcacaatttttgccctgaaataaaatgtcgccttcatacgtgccatgtggatatacaccactcagtaccttcatcaacgtagatttacctgcgccattttcaccacatatggaatgaatttcgccttcacggactttcagattgacattttccagcgctttgacgccaggaaaggttttggtgatgtttttcatttccagaatgattccggccatgggatgtgctcctttcatttattatttcagtccgatctcttccttcgtgtaatactgtgtaccaacgatatcctgctccacatttgtacggtccaccgagatgggatccaagagatacgccggaacaacctcaattccgttgttatatgatgttgtatcattaacttccgcctgttttccttgcaaaatactattggccatctctaccgtcttctccgctagcttccgtgtatccttgaacaccgtctgcgtctgttccccggccacaatggacttgatcgaggcaagttcggcatcctgtcctgtaataacgggtagcggcttgttcgaagtaccgtaaccaatccctttcaaggatgagatgataccaatactgattccatcataaggagataatactgcatccagattatcacccgagtaatacgcactcagcaggttatccatccgtgactgggccagtgccccgtcccagcgcaaggtcgcaatctgggccatcgtcatctgcttgctgcgtaccaccagtttgccggaatcgatgtacggcttcagcacagacatagcaccgtcgaagaagaaataggcgttattatcatcaggagagccaccaaacagctcaatgttatacggtccttttccatccttgagtccaagcttttgttcgatgtaggaggcttgaagcacacccaccttaaaattgtcgaacgtggcgtagtaggttaagtatggcgtattgcgaatgagccgatcatacgagatcacttgtatcccttcgtcatgcgctttcttgattacatccgttaatgtgttgccatccacggacgcgatgaccatcacatccacacctttggtgatcatgttttcaatctgcgaaatctgattctcgaccacatcctcagcatactgaagatcggttttgtacccctgctcctgaaacagacggaccatgttctccccgtctcccacccatcgttctgatgatttggttggcatcgatataccgacatatcccttttctttactgcctgggccactctccgccagattgcaggccgaaagcatcaaggtcatcaccagaagccagatgagcattgctccttttttcatatgaagttcccctttcctcacgtcatacggttctgaatgagttataagataacgcttacaatacatgtagtgcatcctgttgcttgctgttcctgtctgagactatggtagcattggagatgccgcaaggtctttgcacgttttgaaccttttttataaaaatttaacttttgatggaaacgcttaaagtataagtgtgatccacgagataccataccagagtcaaaaaaaaggacatgctccacttcgcttcacacgaagtagaacacatccatctcatttatcacacgtctgaatgaacaactgtattacgatatttaattcgcggaaggatgataagccgtccccccgttctttcgatactgcacaggcgaaatgcccattgttttcttaaatgcagtgctgaaataatgctgggtatcataacctacacgctcagctatggtgtgaatcggcagtgttgttgaatctaataactgtatagccttgcgaatgcgagcatgcgtgacaagcgtgacgaaggaatcattcagctctttcttcaacacacgactaagatatacggcagatacttgtagacgggaagcaagcgattccagggtcagttcccgctcggcatactcttcgtgaataagctgtcttgcccggcgaaccagaggcgacaactgcacttccccgaataccctttcacggcaatgacggtacgtatctggcgtttcttccagtgtccctgcatgtgtctccacatgagcatgaatggcaatattcaggcaagaactaatctgctgttccagaagggactctatttcttcaggggcttcctgccacagacacatgccgatcaacccgcttacgtcccgaaacaggacatgtggcacgtcccccagcagttcactaattatattttccactgcaaacagaaacaactgacgatcattctctctcagtatcgtctgacgagcttcagcagcaggccagcgtacgaccccgatctgcacaggtgggacggcgggcagccgcaaaaacacaagctgctccgtcagatccctcccttcagcctgcccctccagccactccagcataaatcgctggcgaagcaacgcgatattatgttcaatctgatgagctgcctgttgtacatatgccgtcctctggtgctcttcagtaagtcgctgatgcaatcgctcaagtgcagcatataattgttctgcttgcacaggttttaagatgtaatcctctacgccaagacgaaccgcctcctgcgcatatgcaaattcatcatgtcccgagatgatcaggtaacgacagcccgggcacttctgctgaagggcacggattagttcgattccgttcaggaatggcatattcatatcaacgagaacaatatccacacccaagtcagccgcccgttccagcgcttcctcgccatcttccgcttcacctacaacctccatcccgagagttgcccagtcaattgcatctcgaatcccctcacgaatgatcggttcatcatcagcgatgagcacgcggtatttcttcgccacatcgctatccggcgtaatctccattaccgtggccgaagcggatgtctcatctgtttcagtggaagttgtcacggtcaacttcatgaattttcccattcactctcctgcctctcttcgttattgatttgcttggttggtgggagctctcgcatcaacggatgaatgatggtcacactcgttccttcaccttcctggctctccagcacaataccgtactcgtcaccaaaagacagccggagacgggcctgcacattcaacattccataacttttacctgttatccccggcgaagatgcttccaaacttgccaaaggagcttcgagcagctgctgcatctcggcaagccgttcgttggacatgcctgctccattatcctgaacggtcagcagcagtctgttatgttccaatctggcctccacccgaatgtgtcccggcccacgcctgcctttgattccatgatagattgcattctctatcaggggctgaagcagcagctttaacaccaaaaggtcccgcagttcctctggaatattcaatgtatactgaagacgatcgcggtatcgtgtctgctgaatttgcatatagctggtcatatgttcaatctcggaatgcagcggaatgtaatcctgtcctttactaagccctatgcgaaataatcgagataacgcaccaaccatgccggatacatcttctgcaccctctttgcgtgccatccaatgaatcgtatccaaggtattgtacaaaaagtgtggtttgatatgctcctgcaaacttcgcatttcagcgtcgcgcttctgccgctcccgcaattcatttagtgatatcagttgtcgaatctgtgccagcattcggttataactgttgccaagcatgccaatctcatcagcgcgatcactccagcggcctggtctgagattgccggtctccgccctgcgcatgtaggacatgagccggaaaatgggctgagcaatagaacgggagaaccataaagaggcgctcaggccaaacaaacacaccacaaatacaaagctaaccacgtaaaactggatttggcgtacttcggatatcgagtctcttgtgggaaatacccctaccgttctccaacccgtaaaggtagacgactgatacatgaataataacgttccaccttctgtatcggcggtaaacgttccactctcaccagaggggaaccagtctgtgggaatgtgttctattagcggatgctcaggtttgtatacactttgaccttctgcatccgtcaccatcacataaccggatttccccaaggttacattacgggcagcctgagagacggacctaagtttaagatcaatcataataacgcctcgcacacgtcctgacgcttcatccgttatggaacgcgcaaccgatacaatctcatcatccttgtaccgtacatgtgttgtgagattacgctctttcggctgacccaacaccgtgaagatgcccggattggccgaagctttttgataccaattttcctgaatcaggctctgttccgctcggggatacatctcgttgctaatatagtcaccacttgcattgacgagaactatcccggcgatttcaggatacaacgttgtgaatccctgcaaggtttgtttgatgccatataaccgattttgcttcgtttcggcattggtgtccatgttcatcggttcgatacctgcttcatcattcagtggcattttgtcgttcataaaagcatcaatatccgggtcaaatgcaatcagataggtcatattctgcaaattctccattttgctgttcagagcttcattcactttgccaatcagttgcatggtatgcccttcaacctgtcgttcaacaacccgctccaccgtccagttcacaagcaacccaagccctacggaaggcacaatggcgaataacagaaaaagcagcatcagctggtaccgaaggggcatattacgcaagcgtaaacgccgaatcccgttcctgaaagtggagagatttgctctcctactccaaggccttggactcttgaaatcccccttgttatttggcatagtaatcatccacatccgagcgtgtcaccacagagatccctgtgtccaccatcacgggaagcggtgcattttcaccggatgaggatggggcaggaaccgttaactggtgatgcagatggaacagatattggagtgaccaatatcccatattccaggttccctgtgcaattgtagctgagatcgtaccgttcttgatcatatccaatgtagtcttatttgtatcaaacgaaataatctgcaatggatgtctgtccccggcagtttgaacggcttcccccgctcctgcccctccggtagcttcagtcacaaaaattcccgccagctcgggatgttccttcatcattctgattgtttcgtctctggataccatcgcatcaccgtgtccgtctgcaacttcaacaatctgcatggaagggtatctctccttgatcgtatcgcggaagcccttcgtccgctcttcatgattttgttgtccgggcaaggttaataccgcgacctctccctcacgacccagcagttcagccattttatcggcagccattacacccgacttgtaattatctgtcccaagaaaagaataggcctggctatcgggtgcatccgcgtcaaataatacaacagggatatctgcgtcgattgccttgttaatcgctggaactaacgattgaggatcgattgcagatatagcaatgcctgcgggtttacgagcgatagcctgctcgatcaccatggtctgctccttcgcatcataccgggtagccccgcgatattctacggtcacgccgaatgcatccgcggcatcctcgaaacctttgagcgggctcttccaatactccagcccggactggaatgtaatcatgatatacgtctctccgatatcaccgcgtagcccccggtcctcccaagaactgtttacctgactggtgtattcaaacctcaatacatacaacgcaaatgctgagattagcaaaatgtaaacaagtagcatttttttcattccgttcacttcctcaagtcgtctgatcaccttgtacatcgtctaaattgtaaacgcaatcattcaaaaagaaaactccctcgtatcttttaaaagcaagctcctgttgctaaccgtgtacctgctgcaataatgtactatatggtttctccctctggacgtatgatcatggaactaaactacaaccagaggagagcatcatccttatgaatcttgcatcttttttaatctactgcatcgtcgtaacatttacccccggccccagcaatatcgtaattctttcttctacacagatagttggcgcgcgaaaaacaatgcgttatgtctggggagctacgttggcatttggtctgctgcttaccgcttcagcttttcttaatcagcttcttgcgggagtgttacccggaattctgaaggtgatgcagattgtcggcggcctgtacatggtgtatctggcgtaccagatctataagatgggtaccaccgaggatgcaccaaaacaagttaccggattttggaacggtttcatcatgcaatttgtgaacccaaaggtcgtcttgtttactttcactgtcattccaagttatgtattgcccttttatcaaagttcattttcttcgtttctgttcgtgctgataattaccttcattggttttctggcctattccagttgggttgtttttggtacggttttcaaaacgttgctgaatcgccaccaaaaattactgagtattctcatggcactttttttgttatactcagccattatagtatccggattgatctaaagcttgggaggtgtgctgcatggaacggtttaactataaaaagtcgcaagacgtgctggcactatccgccagctttactgattttgcatacaaaaaacattgccacgaagagtatgcggtcggtgtaaccctgcgtggcattcaacaatataacctggacggacaatatcaggcgtctcaccaaaatggtgtcatgttgtttaaccgtgaacagtcccatgatggaagctcctatgataaggctggcattgactatgtgatgctgtatttgaagccggaattggtagaggagattatcggcaaaaaggaattgcgttttggaagtcccatcgtctatgatcccgagcttgcacgtaagatcctgatgctgaacgatgccgttcaactcagacagaacgaagccgagtgcagcgaacgggtcttcgatctggttcacctgctggctcagaaggaaatggacaccaagctctggttgcctcaggacaacctggtccgcaaagccaaggaaatcatgttttgcagcactgaagatgtgctcaagctggacaacctgagctccgaatttggcatgtccaagtttcaatttatccgtgaattcaaagcacaagcaggcatatccccctaccagtttttcttaaactgcaaggtggagcgtgcccgtcaatccatcgaaaagcagaaggacgtatatactgctgttgccgattgcggatttgttgatctgacccatctgaatcgacatttcaaacgggtatttggtgtcacagcttatgaatacatgttgcagttaaactatacaaattgaactaaaggatatttacactggccactccgatgacagaataaccttctgatcgctgttatccccagatttttttgatcccttttataaagggaaaatccagtgataaaggcgaacgctccgcttcttcaagttctttctgtcctctccgttttgtgtaaatgtttagtttaatttatatatttccatcggatcgatagaaccgactccaaatggatacaattttgccgccactcctaaaaatccccgtatagaacgttaatgtaccttaacactctgtacggggattagtttcttttttcgttgggcaatcagattcttttcatgcgtctccagacccacacaactgccaatgctgctaataaaatgactccgccatataagatgagatagaaaggcccagttcgcccaccaccatcattggtttctccaaaatcttctttacttacaacctttcccgcacccagcaatttcagatcgtctccggcttgttcaattggaacattgcgactgcacagattcgtatgaagcttatgatccacttcatattgataagcatagatcaggtaggactgattcttttcaaattgaatgccacaggactcagaaccaccgtcactcgcgagaattttcatctttttggcattaacccccttccatgcagtatctacatcaaaggtatactctcttaataagccatcatgcttcgactgttgagaacgtcccttcttcaccacttctcctgtaaatacagttgtgtttgtcttcaatctctcttgaacatcactctcgacacaactgcaagcatacactctctctccgggaaatagagctaacccagacgtaaccaacagtaagatcaacatgcacatcaccaaacgtcgtttcatttcgaccgctcccctcctacattctctgcttgaataagcgttgttaaggttacatatttttattgctgctatatttattgtaaaattatagcacaatataaatatcgttatgtccgacatacgcaaggacacaacatacgaaatcaaccatcacggaggaactcaacatttgatacacaactggaaaaagaatatctcattcccgctgctcgttgcagcgttatgcatgatcgcttttataagcatcgccctgtccatcagcgacaaccagattcatcgatttgatgataccttaatcggttggattcaggggttggaatcccctggtatgacacaattcatgcacctttttacttggatcggcagccaaatgccagtggtcttcattaccatcatcgccatgattgtgttatacattttcctgcgacacaaacgcgaactgctcttcctggcttgtgtgctcgcaggctcaaccctgttaaatgcattgctcaagctggtattccagcgtgccagacctaccattaaccggattatcgaagtgagcggctatagcttccccagtgggcattctatggcagcatttagcctgtacggtggactggcctttctaatctggaaacatgtacccaccgtcaccggacgtgtgctgatgattgttgccagcgccgtatttatacttaccattgggataagtcgtatctacttgggggtgcattatccaagtgatatcgtaggcggatacttcttgagtggttgctggctctccacatgtatatggttttatcgacggcatttggagcgcatgtcccaactgcaaagcagaaggctagcctaggcggcccgctgttgtactacacaaagaaatacccggctttccttaacggaaggatagccgggtatttttatattcatatatagtagtcctgaactcgttcaggatacatgaatccgcttgtcccatttaagcgaacagacggatctggtttttttcacaccaaattataactcttcaccattggattcaatgacttttttgtaccagtggaaactcttcttcggtgttctgcttaaatctccgttaccgtcgttgtccttgttgacatgaatgaagccataacgcttcttcatctctccagtggatgcactaaccaggtcgatacatccccacatggtgtaggcaatcagatctacgccgtcagctaccgcttctttcatctgttcaatgtgacctttcagataatcaatgcgatagtcatcttgaatggagccgtcttcctctaccacatcgacagcacccagaccgttctcaaccaccatcaatggaatctgataacgatcatagagatgattcagcgtgtaacgcagtccttttggatcgatctgccagccccagtcggaagcttcgagatatggatttttgataccgcccagcagattaccttctgctctctcgagggactcatccgcactttcaaccaaagacatgtaataactgaaggaatagaagtctacgcagccttcacgcaaagtctgctcgtctcccggttgcatctcgatctggataccttcttcggcgaagaaacgtttggcgaatccaggatacgctccacgaacctgtacatcaccgcagatcatattggagatttggtctttcttctgtgcaagcaacatgtcgtccgggttacatgtgtttggataggtggtcatgaaagcgaccatacagccgatctggaaatcagggttaatctcatgtcccagcttcaccgctttggcactcgcaacgaattggtgatgtaatgcctggaaacgagtctgtggatcatccactccgtcgaccagtgtctctttgccttcaaacagaatacctgcagccatatatgcacccatcggcatcgtcagacagttgatttcattaaacgtcagccagtatttgacctgatccttgtaacggttgaacagggttgtacaataacggatataacaatcgataacttcacgggaagcccagccattatacttctgtgtcagaccaaatggcgtttcataatgggagatcgttacgagcggctcaatattgtattttttcaactcggcaaaaacattatcgtagaactgcaatccctcttcgtttggctccagatcataaccgtttggatagatccgggaccagttgatggacatgcggaacattttgaaacccatctctgccatcatggcaatatcttctttgtaatgtccgtaaaaatcaaccgcttcatggctcggataatacgtgccctcttccaatacaggcgtaatccggcgtggaatcgtgtgggttccccctgtcatcatgtcagacgtgcttggccccttgccaccctggttccatccaccctcgaattgattggcagccgttgcgccaccccagtaaaatccttctttcattgtcatgaccagttcctccttcatatctcaaaaagacttttacaccagtgtaccatccataccctgacacctattgtcatggtataatcagagcatggaaaataaccgactatttcgaatgttgcttttgttattggagaaaaagaaagccactgcacccgaactcgcccgtatgttcgagatttctgtacgcacggtgtaccgcgatatcgatcggttgagtgctgcgggtattcccgtctatacaacgaccggcaagcatggcggtattcatcttatggacaactatgtcatggacaaatccctgttatctgaagaagatcagaatgaaattttgatgggactatacagcatcagtgcgatcccccatcttaacagtgcccatatgctacaacggctaaccgccctttttgatcacaaactggattggatcgaattcaatttctcaccatggggtagcatccctctgcaggagagagaactgttcaatcaggtgaagcaggctatattaacgaatcaactgattacgtttcattatgttaattcggatggcgagaaaagcatgccgactgtggagccacagaagcttattttcaaaaacagtacgtggtacttcaaaggatatatccatgatgaccctgatcggaaagaattcgagacatttaagatgaaacggatcacccagttgacttttctggcgagaaaacacgatcactctgttactgccggatcaaacgatcctgaatcagaggcagctcctgtcctgattcctcttacactctcgttctccagcaatattgcataccgagtgtatgattttttcgaaccctccctcattaaaaaagagcctgatggcaggctccgtgtttctctcgaactgaatgtaggggaatggctctactccttcctgctgtcgtttggttccgagctgaccgtaatcgagcctgttcatgttggacaggaattgctcagacgtcatatcaaagccgttgaacatttgcagaacgtcatgaacaaacttcccaacaatgaatgatataatataggcctatacaacttttgatcacagctgactctccgtcatccatctgcccgaaggaggtttatccatgcaagacattagacgcaacaatgtggaacgtttcaatggttttggtacgttatacgatcagaaccgaccagctgctcccactgaagtggtggatattctaacgacatatcttggcagcacaccgcgtatggtcgcagatattggttgtggcaccggcttatcctcctggatctggcttaatgaagctgaacgtatcatcggctttgaacctagcgatgacatgaggtctgtagcagaatccaagtgggaatctgccgggaagccggataacctgcggtttgtgtccggcttgtctcacgacctcggactaccagatggcagtgtggatgtgctgacctgctcgcaatcgtttcactggatggagccgcaacccacactacgcgagtttgcacgtgtacttcgtacagggggcatatttgcagcctacgattgcgactggccgccaatgttagactggcagttagaacaagcctatctgcagctgaataaggaagcagatcaacgagcagccagtctggctccccaggatagtcaggcacacaaatggagcaaggatgggcatttgcagcagattcagcagtccgggctgttccgatatgttcgggaaatcgtatttcatcaccacgagacattcacagccgatcgatatgtcaatctcgccctgagccaaggcggcctgcaaacggcgttgaagctgggagcggatgatctattaacagctgctgacgagttcagagcgctggctaatcgtgtatttgatggagaatccagaaaagtacttttttcttatcgcatgcgccttggtattgtttgaaaaccgtccgttgcttgtatctctcatacataccaaaatgaaaaaggaggtcctacacgtcataaacatgatctgtaggacctccttttgtctacatcctcaggaagagaataagtcacttaattgtcgctcctgtacattcaatgccaacaccaattttgttgggtcttgtcttgaatagatgatattaatgatatgaccttgctgcacctgcggcagggcagatgacaaaatttctttttgcgttgtcacattgaaggtttcaccgttcgttttcgttatgctgagtttgagctgaagcttgatcttgttattgccaccacttccaagtggagtgacatcaaggatcttggccattgctttttcccctgttcttgcaatatccatcatttcaggtgataccccttgctgtaccatcttttcatccagtaattgctgcatttcttcctgtgacagttgccctttcagatcaagccctaccttgcgctcatcctttacggaaactactaacggaatgaaactgcccggctgaaactgtgccatggaggtcagcggaatgacggctttcatctcggtatcgtatttctcgcgccccttacgcgacaccgtcagacccaatcgaacctcaggctgttcattaatatacgtccccgtctgttgtatagtcttaatgaccccaactgctggtaaacctgtcttcactcgacctacgccaaaaatattgctcaaaatcacaggaacaaagatcagtgcaaacccggcaaaaatcgcaggagtgtaccaccatgcctgcataatcataaatggatcattccacatcttctgtgccagaaatggggagaaccccactccgaacacagttaatacgccaatgaatctcaggaaacctaccatatgatctaccctctcttaatccttctcttaatatctctatcaacacctcgaataatatatctattattcgttgttatacgtattattcaaatagagtatcactgaactataaccaaataccttctagatggacattagccccatgtagatcagttcggagggattcgctggattctggcccagtcccactcgatcgcctactcgtggaatctgcattttggacaccagtgtctctaatgttcgctgatactggttgccattcgtttctgtcacatccaatacaagcacaacaatcggatcaaagttgatcagtttgcctgtatcggtgattgtcaccaccgtagccgtagctgttaaaggcagagaaccacttgccgccaactgtgcctgctttgccgaatccagactttggttgatggcctcccgatgttcctttgatacaaagcctttcatcatcatgccagtgagtcctttattcatcattttatccgctttagcaatcgcatcttcctgtttgttctttttaccgaaccatcccatatccagcacctcatttgttttatttgtttttagaagttgttcaaaaagtccacttttgattacgaatcatgcctagcggcatcatcagcatcgaatatgaaattcagccgaaatgtccgttgctcacgtaggtctcctacgctccgctactccatttctagcttcattccatcttctcggtactgaaaaccagactttttgaacacgtatttataattaaattataaacaccgcggcttgtccttgaatacccttctggcggcatacaaaaaaaacgaaaaatccagcaattgaattacgggataatcgtttcttgggtaaggaatgatgctaatttcgcaaaaaaagatctgctaatccaatcttcatttcacgattggcggccatattttgtgccaagtgctcctgcaatgcacaaaatcatgacataatcaggctattgcaagccgattctcactctattttttgcgtaacaaatataccagcttccgataatacatcgctgcttctttgtatttccgctgatcctcggatactacagccatcccctcatataacggttcaagccgcatgacatgctgcgctgattcaaaataaggcagacacgcaagtgcccgctccatgaaaacttcgcgatctccatgcgcaagagccagatggctctggtagaaggttgcgctcatctgctggtcctgtgttgttgcacatttcaaaagttgatctacactctgcgcgagcacgccccagttcttccgtgccagagccacttcgcatcgatacacactgacgagcggctgcatggcctgctgtgtttcttccgtttcctgctgcaatagcgattcaaatcgttcaatctctgtctgtgcctgatccagttcacctgtcattgttaacatgacaatccgattgttggcaatcgccgttaccagatctccctggttgccagcatacacgaggtttgcctccgccatggttaatgccgagagtgcctcctgaaccagccccatcgcgaagcaatagccactatatgccacatataacccggacaaccgatggaacatccgctgatcatagacatgacgcattgtaagctcgaatacctgttttgcctcttcatactgtttgacctggatgtaggcttccatcttgatattttgcacagacaaccagaattcactgccaggaagcgctagctcactgagcctggttgcatgagttaatacatccacaaaagccattttggagcgataatattgtattttatagaataaaagtgccttgactaacggacgcggcagatcaatatcgtctggacgaccgtatttctccaggtaaaaattgaggtaggacgtatgtatatactcatgagccgttgcatcgtttaattgctgataatagaccgccttcattaaggccgttgtcaactctacggtcagcgcgtcatcccgatctgccagtgcatgcaccgtatcttcggatatcgccgacgctggaacagacatttgttcgaagatggcctctgcccgttcaattgtttcctcgtcctgtgccgcagcttttagaatataggaaggggataccccaagacgcccggcgatggcttctgccaagtcctcaggtagcggataacgatccgccaggatattggcaaagtgggcctgcgtgaccagaccttccacaaggtctttacgggagatttgttttcttttgcttagcagttcaatgcgttccttcagcatggtatccctgtcctttctatcctaacaagcgagtacattctattcacatcatcgcaaaattagagatataacgccacccttccggcgaaatcaaacgaaacggtttccgtttccgaggtaattgttttacaataagaaagtatgtgtaagagcattttatcgaaatgctgaaacatgagctgaatatgaaaggatgcaaataaatgattattaaaccaagaacacgtggttttatttgtaccacttcccatcctgtaggttgcgctgcgcaagtgcaggaacagattgattatgtgaaatcccagcctgagctgaaaggaccgcgtaatgtgctcgtgatcggtgcttccactggatacggtctggcgtcacgcgttgtttctgcctttggagctggagcgaatacagtcggcatttaccgtccgagcagttccacagagaaacgtacggcttctgcaggctggtacaattccgctgcattcgaaaaagccgcggaggaagcaggcctgaaatcgtacagcgttacaggtgatgcatttgcaaacgaaacacgagacaaagccgttgaactgattcgcagtgaactcggtcaagtcgatctggttgtatacagcgtagcctcggcacgccgtaccgatccaaacacgggtgaagtatttaactctgtgctgaagcctatcggacaatcctacacgaacaaaacggtgaacttccacacaggcgaaattagctccgttacccttgaaccggcaaacgaagaggaaattcgtcagacggtaaccgttatgggtggagatgattgggaactatggatggatgccctgcaacaaggcggcgtgcttgctgatgatgcaacaaccatcgctttctcttatatcggtcctgaacttacgcatgccatttatcgtgatggttccatcggtcaagccaagaatcatctggaagcgactgcacacaagctgaatgatcgtctgagtgcaaaaggtggacgtgcgtacttaactgtagccaaggcgctggtgactcaatccagttctgcgattccagtcgtgccgctgtacatctcagcattgtacaaagtcatgaaagaaaaaggcttgcatgaaggatgtatcgagcaattgcaacgtctgttcgctgatcgcttgtatgcgggaggagaagttccaaccgatgccgaaggccgtattcgcattgacgattgggagacgcgagctgacgttcaggaagaagtggcgaagctctggaatgagttgaccacagagaacatctacgatctgtccgatctggaaggttaccgtcgcgaatttttccagctgtttggttttgaaaccgatggggtggattatgaagcagatgttgatcccaacgttgaaatgcctcatctggtgaactaaagaagttttggcgtggacgtgaacctaggtttttgttttcgttagcacttctgatgtaatgctagagatatgatattaaaatcaaatgaagaaggaggggccctctggctcctccattttttgtcctttttagatcctcccccccttaacaattccaatttccgtgtccatacactctttcatgtatcccctaatcaaatcgatttaagcagcttttttaactcttttggtaccgtcttctcgatagtaatggaacgcgctccatgcatggacgcaaagaattgaagcccctcccgaaaatccgtaatccattcctccacaggtggagcagactcttccatcgataacaaacgaacggtaagtactccagttttgcgatcaagtcgtgggtccatacgtccaatcaaccgatcaccatgaagaataggcatggcataataaccgtaggttcttttcacctctggcgtataaatctcccatttataatgaaaatcaaataaatcaacaatacgttctcttctccataacaggttgtccagcggcggcaggaaacgtaccgggccagacggatcatagtgtggctcttccctttccatatgcagcagcaaatcctcatcttcagcacgactataataaggcgtggccacgtcctccaccttaagtgggatcattcgcccatctgacacacgggcagcaatatcggcgcgtcgttcagccgctgtagattttatccaacccagacggggatcacgggcatctacgacacgatacgcatgaatgtatttatccagcagagcctgtctctgggccaacacatcgatgtcttctttcatcgtaagtccctgttgctgcaactcagattcggtaatatgaaaataacgttcattcccctgcctcgccaccacacgaatgacagcggagtccaacagtaaattcagagcaagtgtggtatcctttgtctttggcacatccgcactgtcccaataaccacttaccctttcaacagcacgaaaagctcttgaaggcaaaggaccctcttccttcaaacgctgtaacacatgctgcactgttttctccagaccttgcaaggacggagccagacgctcccttaatcgggcacgaacaggttcaaagagagcataatcctcgattggaatgacacaagcagcatttgcaaaatattcaaacaccttgtgatcactcagcagcgtatttaagctgtcagcagtataaccagggtcacgagcccccagcaccaaatgctggtttccagttacagcagccacaggatcaatctgcacgcaaccaagggagcgaatcaaactcaaaacttggtcgggtcccgaaggtaaggaaactgcgggccaacgtcccagtaaagcttgcgtttgcagcaaaaaacgccgaacgatttttttattcatgtgcagcgctgttgtcatatgtataggttctcccttcatttagtgtacaaaattctatcgtcctacttatccagcaatccgcgcctcatagaaaaaataaaaagaagcaccaccatcctggatgatctgcttcttgtgtttgaccttttgcaatttttcctgcttcgtaggcatgagccgtacatgctgggataacgcaccataatctccgttaactcttcggctctgttccgagcaccattgacctgaccgctctgctttgcgtaatgctttttgtgtttgtgtacgtgccataatggatcacacactcctttggttgatatacactcaatatatcatgtgcagctacgcaagtgaaggtgcttcctactggaatgagatgtacatcattaaaaaggcttccacccaagtacttagcgggattgccgctttcgccgggactgccacgtctcgattggttcatgatcatcttcttcgatcagttccaatgcttcttccactcttctggctttgaataacagaattaattccatcaggtcttccctgtccagcagcttcactccattaaccgctgcaagcgtccgacaggcttcggtgtaacgggcggacgttaatacaatcgaccggtcggcttcataataacgcatcgatgtatatatctcctgcacagcactcaaccctacaggatggttcgcaccatatcgcttcgcttgtataacacttcgtctgccgagtctatcaacaaacaccagatctgccccaaaatcccggctgcttgttgtcttatgcacctcatcgtacccgagctcttcgaataaatgatagagatataattcaaattccgaaccatcctccatcttgtcgatgtcctttattgtgatcttacgaggattcgcttcacttcggatccgctgcccgcgcccgataaccctccgaataatccaggccagcagcaacaatataatgatacatccaatgacccatagggtcacattatcactccagttcatagctattctccttgtttcatttcctatgttctatccagcgtcttaagctgatatggcttgtcaccgcactaaatatatcagacttctaccttcatcgaaagaagatgaattccctgtaaccgttatacttccccaaacatagttatttcgacaaaccaatgataaaaggttacagtgcgttcggttgaattcagcttgactttaatggtaaaattcaacaatcggttctattttgaaccgaagaagaaaggtggtttattacttgcatacattgaccaaacacaagtccaaaacatgggctgccctcattctcagcggcatgctcctcttcaccatgaatacaacaggttacgccgctgcttcaaccgaatccatgcccaaaccggcgtggacgtcatcttccctgatgttatctgaggctaatacagagaaagatgtcatgatcaagggaatccatgccgtgccatccaaaaatcttgtatatgtacatgcctcccagcccgtgaccaaaacaagcagcaaaacaacactcgactggcaactggactctctccaagcattcgatgcgacaactggacaattgaagtggaatacgatattccatgagaaaagtggtccttataccacctactctgattcggtatatgccagcaacggtacggcttatgtgtatatggaatattcggacaaaaccaaaaaattgtactcattcaatacatccggtaaaaccaactggatcaaaacggtgaattcacctgcaagcatatctctattggataacgatacgctgatggttgcttcaagtcagggcgtacaaacgaatggttcggttcgctcaactatctcgttatatgacaaaaagggcaagttgattaccgaaaagaccattaacggtaacgtgcttaaggctgaccatggtcgaattatagtggatgccagtaaacaaaccaaggtaggaaacttctggcagcaagctgcgaatcccaaagtagagatctatgatcgtacgttgaatcgtctgtccttctatcaattccctgccaatgcaaatacattaggagatggcggcggtgaatcgctggccattctcgacgatggttccatcattatgcgcgccaattttgagaacaccggtaacagactgatgggctttggcatcgatggcaagcttgcttggggacgtgccattgctggtgatgcctacattcagacggctggcaacggttatacagtctttacagggcagaagctggaactgtacacgatgaaaggcaaagtgactgagcgtacgttcaaggacgcacagcctgcattgatgcatgtcgaccagacacaggatggtcagtatcagcttgatttttccaaaacaggatacattcttgatcctcagacgctggaagacgtgcatatctacacgaccagtgcctcagttccttcattagaaggtgtttcaacttatgtggatgatgtcatctattccatgaacgatgagacattgtccaaatatgtactgaagtccaattctgcaaaataaatactcgatctaataataagccgggagagttccataaggagctctcccggcttattacattggcaaattagaatatcatcctatttccaattctcatctataaattcgtcccgtccggataacgcacggtcttccttataatgtttttcgtttttcttgtggtaatcctgatgatagtcttcagccggatagaatatagctgcatcccgaatttccgtaacaatgggttgagtgaatcgtccgctggctgccagttcctgtttggactgttcagcaagctcacgttgacgttcattatgcacaaagatcgccgtacgatactgtgtcccccgatcctggaactgacctccgtcatccgtcggatcaatctgcggccagtatagctccagcagtcgttcataagggaatacatctggatcaaatgtaatttcaaccacttcgacatgaccggtctccccggttttgacctgctcatatgttggattctcgacgtgaccgccagcataacctgatataatgccatgaatgcccggttgttcttcaaacggtgtaaccatacaccagaaacatccgccggcgaatgtagctttttccattccgttcatcccctcttatcgaaactatctatagaatactgatgctaagttacgcatacattcttatattctaaaacaacaagaggttgattgaaagccatggttatggctctcaatcaacctcttcattggtaatgcatttggctgacaactaattcaagaaattatcttgattaagttacccgcgactacgtcccatcgaacggaagatcaagcttacgatggctacaagaacgatcgcaccgatcaatgcaggtacaatgtagaatccgcccatctcaggacccatatcgcccaagattactccacctaaccatccaccgataaaaccagcaatgatgttaccaataacaccacctggaatgtcacgaccaacgatcaaacctgccaaccatccaatgataccaccgataattaatgaccataaccaacccatatcattcacctctaattaaagtttttgttgttgtctgtctactattaaccgctacagaagcatttaaacaattggcataaaaatttttgcatattaccttttgtccccatgcatctctctctgcaaaacaagccttagtcaggtatggaacagttcgcgttactttccggcatctcaccagctcagggctgcgttatgtacctcccgaaagtcattgtatgttagagcagacaaggttagtatcaccaattgaggtaggattatttataaaattgcgtcatattataggatggatgggttaggtctgatcaataaaagcctgcacggcccttacctggctgcgccagccaagtatgtttatggctcttgtccagctcgccacgcatcgactgaatgactttcacaatgtctgtctgtccattctgatgccattccagcgcagcgctcacatataactcacctagctgcgcaagagaaaacgtgtcggtcagacgagctgcttctactgtgccttcttcacccgcaaatacggtgaagcctcgttggcgcaagtattgcaggcgcagcgcttcatctggcagcggaatttcgtaagctcggtcaaaccgcccagcacggttcatgaggccaggatctattttctccggataattcgttgtcccgatcaggaaaatgccttcttttgacgtagctccatccaatgtattcaggaaaaaggaacggacttcatccggcatcgaatcgatgtcctcaatgatcagtaccatcggtgccaaccgcttggcagcctcgaacacttcacgcaccgattcactgttggtatactccgtaatctgccaatacgcagccgggcccgggatacttcccgcaatggatttcaccaacgtggtcttaccattccccggatgcccatacaataaaattccccgtttgtacgggatatcataatctctgtaaaaagaacgatccgcttcgaaaaactgatccagcgagcggaaaatatcctgcttgatctgtgccgaaagaacaacatcctctcttcccacggagcgagtgatggattccacatgacgatcgctgccattacgggcatcggtgtagaccgttacttttttcatattttgctgacgttcccgttcccggacacttcccagaaattgcttcatctcctcatcaccgatggcaaagacaaagtcttcactgtagatcccgttctctctgaaaaatggaacccgcacaagtgctacgccccatttcggataagcaaatacgttgttgcgaatggagtaatgcacaccataagtaggcacatctccatcatcgtcgtaatgcaaggtctgaagctccagatcttcgaatatacgggcgaccaattccacttcgtcactgccattctgcaggtcttcccggagtaactcccagtattcattgttcgggtcggaactggcatacagcttgtactcaactccatagcgctgatgaagtgcctcactgattccacgaatcagccttgaatagatggcgtacccctccactcgaattcgggtatcatgttgttcgtcataagtatagatcgcctgggttggatctgtttgtttttcgtttattgtcattatttcgctccctttaccgctacaagcggtttgcatttggctacaacttgagccaggcctgcgccggtaacactgtctataatttcatctacatttttataagcctgaggtgattcatcaataatggattcaagtgagcgttgatttaccacgatctcatcttctgtacccacacccagtgccgtagcaaaatcctccacgctaatcaatcgttttgttgccgtccgtgaacggattcgacccgcaccgtgacatattgaataataattatcagcaccctgcggctgacctaccatgatatatgaagcagttcccatggaacccggaataagtgccggatgtccagttgccagataaggctttggattgtccgggtgacctgctggcaacgcacgtgtcgcccctttgcgatgcacaaaaacggaaccttggtctgcgtgagattcctcccaggcatagttgtgcatcagatcgtataacgtacgaaattcacatttggagccaaacacatcccggaatgcttcgcgaatagcatacgcaatcaggtgacgattgacaacagcgtaattcaatgcagaatacatcatgttcacataatgacgaccttccgcatgctcaagtggagcaaataccagtctgggatcggatgtacccaggttaagccgctgcatgactttggcaattgctgacgaactcgtctgacttacatacccaccccatgcacgagagccggaatgaatcatgaccacgacctgtccatcatacaatccccaagcttcagcgatttcacgattctcttcagcgatctcaatcgcctggatctcggcaaaatgattccccccacccagtgttccgagctgacgatgcgaacgatgccatgtcatatcaggaacgtggtttaacacatcctcatcgtaactgaacttgctgctttccacatgtgtcatcgcggttgattttttcggtgtatagctgtccggaatatactttttgggtaaaccatgcaggcctttacgaacaatatgctccagtctgatatccgagtaatgacctcgctggttcgcctccatcggcaatactttctcaatggccttgacgagtttgcggcgaagcttgatgtctttcaattcgtccttgtgcaagtttgtcatatgcactcgcatgccacagccgatgtcactgcccacgatggagggagaaacgtatccgctctgcgcatcccacacggctgtcgttccaatgcacgtacctacaccgacgtgtacgtctggcgtgtaactcatataagagattcccggaatctgcagattattgttcgccatctcgaataccttgtaatcaagcgaggagaagagttgttgcgccgcatatacggttagatcacctgcaggcaattttacttcatgccggtagccacctgttaattcgtttggattggtaaataaattaaattctgtattcataaaagtgtattattccttcctgtacgttcagcaaattcggttgctgattcatctgtaaaataaatattaaaaaaagccataggctagtcgcccatgacttctactgaatgacaataacggagaacagaacagcataaacatgctgtgtatctgtcatccatcgctataatataagcgaagaacgcatatcattataaaacctgctaaacgatatgcctatcccctatgtcgaccgtatgaggccaatgaaacgatgagccggatatgctattgtgtctacgttgcgccctgtttgaatcaaatcataaccaagcatcatgtctctcggcctcccttcgttaatgttagtcttatattaaggggactagaattcatgtgtcaacccttttcttggaaattggtccatggtgtagattgcatatgtaaacaaaaacaggagattgtcctaggacaatctcctgttttccaaataataatgatgttgttagcgtaacatgattattacagtcctgcttgtttttctaactcttcaaccggattttcgtcttctttttcaggaactttggaagacaggaaccaaccacataccgcaatggtgatcagtacaatatagaatccgaatttccaaattttattttccgggaaatgctcatccagaacacccaatgaagggtgtgcgagtgtaataaccgccagcttaacccctacccaacctacgatgacaaaggccgcaacttcaagtcctggacgggaatgaagcaatttcacaaagtatgaggctgcaaaacgcatgatcacaagcccgatgaatccaccgaggaagataacgataaactgtccaccgtcgagtccgccaattggaggcaatccacttggtggcaacgccacagccaaagcaacagcagccagaatggaatcaactgcaaatgcgatatccgctacttcgaccttgaaaacggtcatccagaaaccggattgttttttcggtttcttcggcgttgaatcagctgcttcatctgtcttattgcgactacccagtatctttttaacgatatggttaatcgaaatatacaggagatacagggcaccgatcgcttgcacctgccatacatcgacgaggaaagagatcaggaacaatgaacctaaacggaaaacaaatgcacccatcagaccgtagaacaacgcttttttgcgcttatcttcaggcaagtgtttaaccatgattgcgagtaccaatgcattatctgctgcgagtaatccttcaaggaccactaagacagcaagcacccacccatattctaataataatgaaacatccaaaattgactcctccttaatattcttatgatgtacaaaaaaaaggacctttaccatcactggtaaggtccttttatatccacaaaaagagacctttaccgagcatgaaaacttggtaaaggtctcgctaacaacaaaattgctgccaataaagccggggatatgatcccgaattgacgactttactgtaaaagctactcccctttaacaggaatatgtagttttagttggaacgggttgtttaacctgtactcatcatatttcataacgttaaataaagtcaagctttatttagttgacgatacagcttacggaatacgacaacatcgtagatcatattccccagtggaatgaaagaaacaaagaacagagcaattggacggcgcagacgccatttctgtgaggtgtacatagtcaccataaataacaaatacattaaaaacaaaaaaccgtacagattcccaaaccatgtgacagcctgcggcataaccccagcatctctcaacggaaaagcaacaaacagtaacaacacgtacgaaatgccctgcaaccacaacatcagccggaagcgccccagcgtagaatgtaacattattttcctcctgcttttatacatgtaacgaattcaattgttcccgtacagtatatcacaaaagctgaatatctcgcttgatgccatgtagcagattattcctgcacgcttatatggttggctcacctaccatttcgcaggagccaaatgctttaacttctcataagatatatgacgaagattgttacagatgtcggacaaggaggagccggatcatgaaaatagctatggttgcacccgagaaattgcctttgcccggtaatggttccgtggaaatctgtatcctgggcatcgctcgtgaactagcccatcgccatcaggtgaccattataagtcgtcaaatgcaaggtctcgccgccacagaacagatcgatgggatcaccattcaacgtgtccctgcgtcgagtcctgtcatgtacaccaaagcagtcatacgtttgttatcccaacaaccctatgatgtaattcaagtggataacaggccacgaagtatggctaccatcaaacgagcctttccacgcactcccgttgtactctatcttcactcattaacgtttgctcagcccgggccttccaaactcacattaatgaaaaaagctgattggattgccgtcaacagtcattccctacgacaaaggttaggccgcagatttccgttggtaaaacaccggatgagtgttgttccattgggtgcagatctaagccgcttcagacctgttgaatccagcgaagaacagattcatctgcgtacacaatttggagtaactaaaccattctctattctgtatgtcggcaggctgatccctggaaaaggtgtagacgtattaattcgtgcgactgccctccttcagcaacaggtatctgttcaactggttgttgcaggcaaaggacctccgtattacatgcgtaaacttcgcgaacttgcccaaaaacataaggtccatgtttccttccgtggtcagataaaccatgagcatatcgatcagttgtatcgggcagtcgattgtctggtctgtccgtctcaagaacatgaagcttttggcctggttaatgttgaggcgatggcttcaggattacccgtcattgcttcggataacggaggtattcgcgagattattgaatcaggtatcaatggataccttgtcactgcttataagcgccctcaacgtttcacctcttacctgtacaaacttgcaagcaatcccacttttgccgagaagttaggaaaggctggccgagacagcgcaagggcatatttcagttgggcaagaacagccatgcatctggaagcgacctataccaggctcatccgtaaatgagccttcttttgttacgatgatcaagctttttcacgaaattgccatcccttaatcaaagaatccatctgcggaacaggaatgtgactcatctcaattaactccataatcaccatatctctcatcatgaatcgtactttggcacacgttagttgatgaaacacatcgtagaatgccgtcccggcccaacatccatgaggcacgaccagcggatcattaacgatataacctacggctccaatcgggggaataacaaccttaattgcttgatgatccaaacgattatctggatctttgacgagatacacggtatcccccacatgtagagcctgtactccatcgtagtggtccatcccatacatagctgcgaataatttggtgctcatattacctgctccttttcctgtacttctccatgattaaaatttttacaaagatacatcggtttcataatgttccaaccactcgacaagttgcctgcgtatctctctacggaactcacgaggttcaagtacctctgcctcgggtccaaattgatacaaccatttcaaaaattctctgctgctattcagtgtcacttcaaataacaatcccccatcggacatattcgtcattcgcgggcgaacaaacatttcttcttcttttatgtagggggccactttctcagagaatcttaccttgaaatggatattttcgtcgccacggtcaatagaccatgtgttcttcatatactgcgttatgttgaaatcacccttgtcgaaaccggcatttgttcgtgtcacatccaaaaaacggctgatccgaaacaatcgaactttctgcagcaaatggcagtatccaatcaaataaaaacgttgatcacgtggaatgagataatagggatcgatatcccggactgtgatctcatttcttgtcagcgtatgatattgagtacgaatggtttgctggcttagaatagcttcgataatgggaatcagcaaattagggtcttttccttcctcgcgataagctggcgtgcccatccgaataattcccgcaatattctctacaatgtcactgtttcttgattttaatttggtatgagccgacataaccttgtcaaacgctgaatcaaactcagcaggtaacttggaggtatcaactacggacgggagcaaggagaaaaccattgcttcctgttcagtaaaatctaatggatacatcgcaaactcaccaataaatcggtaacctttgccgtatccttcattcataatcggggcgaccctatccaaaatccggagatcacgataaatcgtgcgtacagtcgtaccgcatttcagcgccaattccttggccgaaattccaggatttgcttgtatagcctgaagtatacgcagcagacgaattaatttctctgtcatgtagtttctccccttcgatattttatcggcaaggaaaactagttcctttagtacagaactaaatctttagtcccaatattattttcgcaatttcaccatttttgtatagtccaattgcactcttacccccttttaatatacattctcttactcgcttgcgtaaaacattaacctaaaagaccttaaacctaagcctgaaagcctatacaattttctgaaaataatacaaaaaagccctgatctccacaaagagacaaggcttttctcggaaatactaattattcaactgtaataattgattcatcacatttgccatatgctcacagagttcagcaatgtcccccatctggtcttcattcacactgcggtcaaaacaaacgtgagccatgacgttataaatgattggctgttcatcaaagatatactggatagtctggcatatcctctgctcaggccagctcttctgtaatatcgaacgaatggctgggcactgcttctcaggctctttcacaaccatactaaaccgtagttccaagcggcaacccggattcgcaccaggcgtctccaggatctccgctgcaagctcctcgagggaactgcttaatacaacttcccctgttacttccgggcgatccctgagacagaattgtaatgtgaactctctggacatcactgccatctccagccgatctttacgccccgtaatctgaatacgttcgtccaggttatccatatcatagagataattctcaaacccgactttcagattgtcatacaccgttggatcaaacattgaattaaacctactttctaaccctttaacatgtattgtagtacattctcatttttcatgcgaacgatgtgtctattgaactctcttgctcggaaaataaaaaaagcccagtcactaggactgggctctggttaagcatgagatctggcaagatcccgtagcttggtttattcttctgtagctttttcttcagttgccggttcagcttcctcagcagatgctgttggctcttcctcagcggcttgtggcggcatgacggacgcaatgatggattcaggtgatgttacgagtgtcaaacctttatcgagtttgatatccgcagcagtcaagcgatcgccgatgtccaatccgctcacatccacttcaatggacgttggcagatccgcaggcaatccttctacttccagctgtgtctcctgtgtctggaatacaccgccagctttcgagccggccgctgtaccttggaagtcgatcgatacacttacgctgatcggcttgttcttggaaatttgcaaaaagtctacgtgcaacaaacgtccgttacgctcttgctgatccttgatcagcaccggaagcgttttaccgccctccacattcaggttgaacatttcggagcggcctgtgcgtgccactttcagcatttctttttcatctacatgtattgaagcaccttcaagtcccgggccgtaaacgactgcgggaactcgtccgccttgtcttaacaggcgcagtgctgcacctttcttttccgttcttggcgttgctgtaagttgagccatttttccgttggatttcatgattgaacatcctccttcaagggatcactacattatatttgttggaaagcactgaggcttatctcatagaccataatggtcttttttcctttggccgaatcgtgggccatatctatatttaccccaatgatagaggatctcaaacacgaaacaggacaattaattattttttggcaagttatgcggcttctaatcagaccaaaaaagcagtcggaatctcttccaactgctggtttaacaaggttttgacgaactacattcgacgttatacataaagaaactatgcgctattacgatcctctgttttttcactttcacgaatgatctgcatctcgtctgatccgctacggacaataatgtgtacatccccgtcttcaggtacaatgtccacgtaacggtctccgcacgtatctttagcttcccattcgttcaatcgtatgatcaatcccaggtgatgcagacccggagcaacgcggaagcgggcttcggcggcattaccgacttgttccagccgtactgctccgtcctccatacctgtgccccatacccagacatcccaaccttcataatgctggtcttcccgttcgtatcgaagcgtgacggttcgcgaaatctgtttatgaatcgttacgccaagcgttgcccgaattcctccagcttcagcaataatatgggttactccaggtgtcatcgcacgtacgatccctgctgcactcaccgctgcaagttctggatgagaagagctccagcgtatattcgaatcctgaagcggctgaccaaattgatccagaaccaaggcacggaagcgactgattcgagtcatgtacatgacaggttcgcccacaatttcaattcgttcagcatgacgataatccacttgtaacatacagcttgccgttatgtccccacagtggactgtaatcgaagcttcccctcgttccagtgcatggattgttccatcaggctggatctgaataatatccggatcagaagaggtccaggtaactggagctttttctaccacattgccaatactgtcccgtacgatcgctcgcagttgagtggtctcctttggactatatacctggcgaggaaaactaatctccactgttgatggttcagcgcctccagcatgctctgtgtcatacagtaccattaaagaccatcgttctacctgaacagtaccacgaacagtctcgatcacgtctgtgcctgcctgatgatcattgaccacaacatgccagtccccttcccccaggtcgacatgctgctcatgttccgttccgttatagatgaccataatctgattccaggtgtcctgattcgcaccattctgaagtataaaggcaactacattgccatccgcacgaataacacgaaggtgatttcgtacctgttcagcatcgatcatacgaaaagcgggatgtgttctccgcaaatgaataagaccacgatagtaatcaaacactggtctgaagcgtgatttgttggcccatgtgatggcgttcactgcatccccactccgataactgttatgatcaccggctttggatctgagcatctcatcccctgaatgcagaaacggaattccctgagaagtaagcagaatgccggaagacagtaaagagcgacgaaccatctcatgattcaaaacatcatctgcatccacataccgataaggatctgctgcttttacagcggactcagcactcccaccacccacgggctgtccgtccttccatacgggaaatcctaattcatgtctaaggttcattgttgtcgcaattttatcccacagattgagattatcatgagcagttacataattgacaacttccacaggtgaagatgtgaaatcatccagtgctcctgctaatcccctaataagctcatattcctgccctccggcacccgtgacaaaccctctgccactaccatcactatcacccttgattgcactgcgaaaatgatcattaaatactgcaaacccctgacctcgctgggttccttttaatgttttgcggtccaaaggtgaatctccacccatccagggttccccatagatcagaaacgccggatcgatctgctccttcaattcgtgtgtcaattcattcatcgtttccgtatcaatcagggccatgaggtcaaatcgaaatccgtccacatgatattcttctgcccaatatcggagagaatccaaaatatattttcgcaccattggacgttctgtcgccaattcattgcctacaccagaaccattactgagggtgccatcctcccgataacggtaataatagcctggtacaatccgttcaaaaggtccctcttccacgctatacgtgtgattatagacaacatcaagtacaacgcgaatgccttgtctgtgcagcgattgaacgagtgatttgagctcccgaattcgaactgcaggatcacgaggatctgtcgcatacgaaccttcgggaacgttataatgctggggatcatacccccagttgtatggtgctctgacatttgaacccacatctgccgtagcaagttcattcaccgtctgataatccgccacaggcagaagatgtacatgagtaactcccagttcggcaagatggtctacgccaatactattgcctgctctatccgtcagaccggatgccgtgaatgccagatattttcccttatacggaatgtctgcatgtgggtctgaggagaaatcacggacatgcaactcatataacacggcatcgacaggacgtagaaaagcaggtttgacatccaggtcccaatcgactggattcgtggtctccgggtctataatagccgttcgttgcccattagccgttaccgctctggcgtaaggatcaacaaccacttcaacccgctgattatcatggataattcggtacatataataatgtcctgcccaatcgccgctgagcttcagactccatattccgtccgcatcgcgcgtcagagtatgttcctgcccattttcatgatcttgtactttaccactatcgttgtaatgcccttcatcgtcaaaaatcaatatataaacctgctgtgccgtaggtgcccacaatttaaaagtacttgctgcacgagtatatgttaagccaagatcgttgccttcgtaacaaaaagaagtccattccggcatcgttcccaccgcctttatatccattgatttcgtgttgtcccgatgttacggagcgggacgtgttttgtcaacccggggttgtctgtactcatcatatcggtccaatttgcgtattcaattagcaatcgctttcaaaatataggatatgaaaacaagtgccatagattgacagcatttgtacctgtcctgacaaaaaaagtttggaatatacaagaataaattgcaggatgtcatttggttgagattaaaatgcacccaacaggtgcatagcataaaaaagtttcagacatgacaatgtatagccctgcgaccaaggcagtggtttctgacgcatcaacaaatccccctttcttacaggaaagggggatttgttttatctcaatttatttgattaaattcgattgattggataccttgaacgtgtcgttgttagcgattttactaatggtctgttggcagccttcaattcttggcaagcattgcgttcatcaggaattggaatacattaccgtaagggatatcgcattcacatgtacctgtccgttctgtatggtacgtatcgtatcaacgcctgcttgtcctttttctacaatcacattccatgtccctgtgggaacagcgatgtcacggttttcttttgccgcgttatagatgacaacaatacgttcccatgaatcgctggctgctgtaccgttcagttcatacgccagcaacccactacctttttctattagacgaatatgcttctcgatctcctcccgggtacgaagtcgaaaagctggatgttctcgccgaagacggatcagcccacgataataatcaaataccggcttgaacagctgcttttgctcccaatgtatggcattgactacgtctccactctggtggctgttggcgtccccatatttgctgcgaagcaactcatctccggccgcgatcaggggaataccctgggaggttaaaacgataccattggcaagcagacaacgcctaacggtctcattctccagaatgtgttccggatcgatctgcaggtaaggcttagccttctctacggcctcttccacactctggcatccacgaatacttccatcctcgtcataggtgaggaaattcaaggtatcgtggattccttgtgtacgtgcaactttgtcccacaggttgagattatcgtgaaccgttacatagttaatcgtctcggatggaccatccgtaaaatcctgaatggctccccggaccccagtccacaattcgtcttctttcccgtccgcgcccgtcgcaaatcccgtacccatgccatcgctgtctcccttgatcactcctcgaaaattatcgttaaacacagcaaaacccgccccgcgctgcgttccttttagggtcatatcatctccaagaggcgaatccagtgcgccccatggttcaccatataacaatatggatggggatacttctgcgtgcaactccgctgcaagttgtttcatcgtagttgtgtcgatcaggcccatcaggtcaaatcgaaaaccgtccacatggtactcctctgcccagtaacggaccgagtcgatgataaacttgcgaaccatggtgcgttcagtagccacctcattgcccgtacctgaaccattgctgtaggtcccatcggcgttttgacgatagtagtaccctggtacaagtttttcaaaagagctgcctgccgtatcaaacgtatgattatataccacatccataatgacacctattcccttgttatgaagggcaagcaccatggatttgaactcacgaattcgtgtctccggatcatctgcgcgtgatgcataggaaccttccgggacattgtaatggagcggatcatatccccagttatagttggaggcatcagacgtatcaccatccactctggattcatccaccgtcgcaaaatcaaatacaggcagcagatgcacatgggtaatcccgagttcaaccaaatgatcaatccccagtgtgttgccctccgaatcacgcagacccgtctcggtaaaagccatgtatttgcctttattcgttataccagatgaagggtgaatggaaaaatcacgtacatgcagttcgtacaggactgcatctacagaactggtcaattctgggcgaatatcctcactccatcccttcggatgtgtatgctccagtctaacaattacacccatttctccattcatggtcactgctcgggcgtaggggtctacagcttgggttgaatgtccatcttcgaaagtaggcttgtacatgtaacggtagctgtttaagtcaccctccagttccagaacccagatgccttgttctttcttttgcataggtatcgcctgctgtttccgttgattgggttcttcctccgggctcccccctgtcaaaggtgggtacagaagtagttccatctgaacagctaacggtgaccagactttgaagtgacaggtttgtgcttctaatgtgacacctaaatctcttcctttgtatgtatcttctgaaatcaatagttcctgcttatcctcttcaatcatgtgtgttgttcccctctcgttgagaaaattgatgaatatggatggtacgagtgctccttaccctttatacccgttctgctgcccaaccataatccgaattacacaaaaaagaagacaaacgtcatgtagattcacatgacgcctgccttctttatgggtaaaacgatatctccctaatgcggtacctgggattggaaatcattccggctggattgatccgcgtggtacaaaaccacgtccccatcttgcatcagccagcttctcccctgaccatctaccgggctgttatcaaaaccttccatttgccattgattcatcaacggtgcatgaatatattgcagatgcggtgcactcgtattgccactgcgcaatgtttcgatattgaagttaaccacaatgtaaccgtccctcagaaataccgttgccttctcatccaactggttttgtctggcaagtgactcgagatcggttcctttgggtactgaatatacatctgctggcaagctatattccccataccagcgctgaatcgctgcattcgcccgatccacattaacactggagggaatatccgtttttgggccaatgagtgtacggatctgtgaaggaagaatcatccagtcataacgacctacccacgttttatgatgagaggtctgatccacgaaacgaaccatatgttccaccattgtaccctgatttcgttcctccgccgacagttcatagatatactgataacgcgctgtatcacctaactccgtaccggggacattccgcaaccgtgagttcaggacaacaaaacgtttttctaaatcttgtgccgatccgatacgaatgagtcgttcctgtcctcgatggtagtataaatccacttcttgtcgggtggtgccatctttactcacaaaagagaacgtcggcgtgattcggataccatcctgtttcccaaacatattacccttggttttcagatcaaacttgagatggtaacccgtcttcactgcagcatttcggaacccctgtaccggatgactgccgggacgaatgggaagtacaaagggagccaaattacctcggggatctccgtctatactgtttcctccggcccagtagctcacacccgttggttcggagctgcctatccgcttgcggaacacattctcccagttgtagtctgaaatatcggtgatgtgaaaatcatacaatcgtccgataacctctacagcaacggtatctgctgcgacatgatgggtcagattcgtattggcatcctgttgttctgtgaagtttgccggtgcattttcggcgatattacgaaactcgatctggtaatttccttcatctacccatacaggaagataaaaaggggtgtccaactgatttaccggaatatctacccatgtcatggccggaataaactgacttctggcaccgttatagacatcgaatggaaaacgaacctgtttgatccggaaatatttcgcataatcatggtttccatacccaaggtaactcgctacatccagatgctgtcctgaagttgggattcgtacaataaacggacgctctaaaataagtgcagctctggtcggatctggcgtagtcttctgattatgaggctgatcatctgacacccaagcatagttcacaactggagtatgtactgtcaccgagttaatgcccagaatggggaacttctgatcctggcccccgttaacattgccagggagaagtccatacgtaatctcacccgtggtcgactggttagctttgttcatcaatgtgtttttgattgtcagacggttctggtacagaacatcttctccaatcacgccaggctgcgggatcgtcccaggtcttggagctgttttttccacgggagcagggtccataatcgtcgctccattaaaggttaccttgtcattattgacggtattctctctaacttccgcttcagctttggattgaaacaatgatgtttcatctggcgtaggcggttcatccgaaccaccaggaacccctttgatgccaagatcaattacttgacaaggcgcaggtttcacatgattggtaagcgcagtatccatagccgattgcaaagttggtggtgtatatgcattgggcataagggtcacggtgtcaccataaccgcctagcgcatagttagataccttggcctcatttaacttgtatacctccaggttatcgatctgccaatagctatatgtccgtgttacttgcatggttttatccccaggcacatcaagttctttgggctgaggaggtgtccctggatccccctcaccactagaggctcttcctgggatcgtccaggttttatgataaacccttttcactttaacggtgtaagtcaccgttcctgtcatgttaacccaacggtgctgaaacagatattccttggccaagacattggcatatagatcttccgaagttggaataccacgggtaacattgaacttctcagatccccgatcgtctgccttcaacacacctcgaactgacgggtccataaccgatgcgtcaataaccgtgcctctactcggtgggctgatggtcacggggcaagtgttcgcagggtcaccccccggatcgccatcaataccaccctctccattatctgtgcagtccttcacctcaagcacctgagtcccttgttcatccagttgctgagcagaatcaagaaaatgagctttgatggtagtgctacccacgatcccttttgtcgtgattttgccatcagcgccgattgttgccacagccggattcgagctttgccacgtcaatttgggatgagccgtcagtttatgaacagagcgatccagtttggttagaactgcttctgcctgtagtgatgtcgtattggctttacaagcattcggcaaattcaccacgagtcctggctcagacgtgactgttatggtggcagtatccgagatcagatatgtaccattgttccagatcgcacgcactgtgaccgtgcctggactttcggccgttaacatccctgttttgagctctatactcgcaattgtctcgtcagaagaaaaccatttgatctctgcttcccgtcgggatacgtcgatgccctcaccaaaagctgtcgcaccataacctttcgtcttcaccttggcttccatttgttgtgttttccctatggtaagggttgaatctggggttacatcgatttctttttcttcgtaaatcttaccttcccagaagatgctaacaggggtgtggtacaccatcttatatttgggtttattgcctggcctagtcccataaggttccctttcaaagaactcaaaccctttgccagtatatgttctaagatccgcatttttttcacttgtaactcttggactacctattccttcataactatttacctgctgatattttacaccatcaggatcgttctttaacttaatatcagttaccatttccttgtcaattcctatacctctatatggcttccaacttagtggcggccatctactcatatcaacattatcaggaatttctgattttacagggtatgcatcataatcagttcctccgttatccacatctttgtgtgtgccttgatattctgccctaaattctcctgaatcaagttgataccagtaaactcccggagttccttgagttgggtttgcatcaactgttactgctggccctttcatggatttggaaccatattgttcttctacggcattagctttaagagtatcaaaagtgcagtaatagactggtaatatcataaatataattactaagattctatataaacttttaaaaccacctaatagataacgtttaatattaaatttaaacaccaccaaaagttctattgatagatttgaacttctttaccagcatcattcttcaacatatatcctccctttacaggatccagagtatgtgatgaccaaaatttggtagataccccttgcttcaacattgcgtttgaatcgtctggtaaagtaataaatcctttttctttcaaatagctcacgttaaataatcgttgaattggaatagctatattatcattcgctctagcaatagttaaaagatttgacttatcaagttttgaagtaaacgttatctcagcgtaggtagagaagcgccccttttgtgccctagtcaagttattttgatctacaaataacgtggcgtacagtcccttgggcttagtccctcgggtatccactacgataaatctatggtaccttacgacccccacattatttttcaacgtgtactctgtgttaactatatttccgaagttacctttaatatatttgtaatttgatactgtcgttaaattcgtacccgtcgtgccgacctctctcatctcattcaggtcactatacttcccggcatccgtgccctccacatccatataacgcagtaaaatggccgatacttctgcacgagtggttgaatccgcgggttttaatgtgccatcctggaatcccccgacaatgcctgtcccacgaacgagagcaagatacggaatctgctcggcacgaatggtgccgcggttcacttccggtgtggggagcagcgtattttttgtatcgttaaaagcatcctggaagctggctccggacttgatcagtccatttgcaatccatttcatcatctcgtaacgtgtcagttccgcatttggattgaaccctttggcataatcgccagcgttaatgaatccttgtccaacaagttggctaaccgctgcttcagaccaatgtcccttgagatcggaaaacgggttttgcccctctaccttctccagtccagtcgcacgggcaagtatggtcgcatattccccacgcgtgattttgccattgggacggaacgttccgtcttggtaacctgagatcaagtttttttcatacgccttggcaattgtcgcttgagcccagtggcccttgatatctttgaacttgctaagagcagtatcacttgttcccgatgcggcattcgcttttgacgtcaaatgtacgggtccaacgggcaatagtgttcctgccaatacagctgtcgctaacaacccgacaatccaaccgttccgttttttcttcttctcgtgtccattaatctgcttcttcaatctactcacgctcctatgtaccttagtatggggatgctttacttggtcagcctagtcacttctcttcataaacaaaacctaaatttgccataataatcaatattctaccatgttgtactaggctattggtattatttttcgtccatccccatcacgttaaggcgtgcgcccctccttccatagacccacttcattctcctaaaacacaaaaaaggccatgaatccgcagattcatagccttatgctttaagggtgtggtctttcttatgatattgaaaaatgaactcactcatagaataaaccatatcattccatttgatcaaccttttttatttcccccagctttattttccgtttaattctttgtaggatgcttccaattccgtgatcaattgatcaccaccggcttttctccagcttgcgatttcctgctcccaacctgcatcatcgattttacccataatgtacttggtctgcgcatcccagatcatctgatccaactcctgaccacgctcagtatagatcgccgaagacaaggtgagtgccggattggcaatggcatactgctcattctcacgcgccatctttgtacctttcataccaatcggaacatcaaccagttcaggcacgttataaccttcaatgcttaataaattatcccgatatggcttcacttcacgctgataagcgtcaaaatccttaagttcggttttcccatcagcagtcttggtgtagtgcacatcgagcaacccacggagctgcaaagcgctcaattcctcatccatcaactgatccaggaacgtgagaacctgcttcaattgctcctcatccgtaacggatgccttcgggatgaccagcattccgtagttccctggttctccggcgatgcgaataccatcggttccctggaacggagccacatcaatttctccatccggagcgttaggtgtaagccgctgctgagaggactttccgttctgggccacaccgttaagcttcatgccaactaggcctgaatccatttttttgtccgcatcagaagggtccagagcaggaaaatcactattaatcagtccctcgctgaacagtcgcttgaagagtttcatcgtatccacgtattccgaggtcaagaactccggggtcagtttcccggcatcatccactccccatttgttaacaccgccaatacttacagcaatccgcgtcagtggggaagagacaccctcattatactttttaaagagcagtgcaccgtacgtatcttccttaccattcccgtcagggtcatccttgcgaatagagcgcatcacttcataccagtcatccagcgtttttggtatatccagcttcaacgtatcaaaccagtccttgcgatatacgatcgcagtccgtccaatatcccggaagttcggaataccgtagaccttgccttcaattttgatattgttaaaataagcctcggattgggcagacaggtttttataatccttcaagtaaggcccaagttcccagaacagtcccgttttggcggcattaaatgtggtcggtacataattcacccgcataatggtcggcatctcacctgaagcaaccataacattcaccttatcatcaaaagcagactgcggaatccactgtacattaacatccgtatttgtatattcctcaatcttcttttcaatcccgttctccttggccggtatatctcctacctgcattaaagagatggaaatgggaagtttaccttcccctgcagcaggtgctttttctcccccgcaacctgcaagcaatccagcggacattgcaccaattacaacgattccgcctaaacgggacattggaccttttggactcatgaaccatctctccttttggataaggttatgtacatagaccactccgatgacagaacaaccttccgatcgctgttatccccagattttttgattcccttttaaaaagggggaaatccggggataagcctatgcttccgatgcagctttctttcagaaagcttttaggcgaacgcttcgcttcctcagattatttctgccctctccgttctcatgtacatgttagttggacttgtaaagttcaatctccactcctgccaaaatgaacggagcgaccgacttcggatcattaatccgaatggactcggtcacataatactcataggacccgtcacgatacgggcttcccccaagaccggctccgccattacactgcgtcaaggacagcacgccttcacggtccgtttgcagcagatgctgtagcagaccctgataccctttttccgcaaccgctttgaacttgccactcagatatcctttacgcacacctttggccaaagcatagacaaacattgaggtcccggaagcctccagatagttccgctcacgtcccggttgatccaacaaatgtggccatagtccggtctgctgatcctgcacatgcactagtgcgttggctacccgttcgaagatacccacaatctgaccgcgctgcggatgatctaccggcagataatccaaggtatccacaaccgccatcacataccaacccatcgcccgactccagacatgtggtgaacatcccgtctcacccgaactccagcgctgctctttgctctcatcccaggcatggtacaagagaccgctacgcggatcacgtgtacgttgctccaccagcaagagctgcagagccgccttgtcaaaccacttctcttcacccgtcactgcgccatactgggtcagatacggagtagccatgtacaatccatccagccacatctggaaagggtaaatctttttgtgccagaacccgccttcactcgtatgtggctgtcccttaagctgagtcatcagcaactccgcagctttgcgatacttctcttctcccgttttctcgtgcaacaggaatagtgatttcccctgattgatctgatccagattatattcctcgattgtataggagcgaatggagccatcttcctgaacaaaatgatccatcagctcacggatgtagtcaaaatacttttgctcccccgtgtgcgtatacagctcctccagcgctttcagtaagcagccgttctcataatgccaagtggaatacagctcatggttgcgataactttccatgaattgctgtgccatgcgcaccgatgtgagttgcagtgtttccttcatgatcaagcctccgcttccggctctttattgagcctgttttttgtaatcttcggcatattcctcacgaatcttgtttccacccgcattgccccaattctcgatttccttctcccagccaccttgatcgatcttgcccataatgtatttggtctgcgcatcggcaatcacctgatccaggtctgccccacggtcaccatacgttggagaatataacgtcagcgcagggtttggcacagcgtgctccgcaagttccttggcaagtgccgtacctttttcacccagttcggtatccttcaatttcggtacgttatatccttccacataaggaaggttgtcacggtaaggtttcacttcacgctggaatgcatcgaagtcactcatctccacctgatcttcgcccactttggtgtaatgtttgtcttccataccacgcatcaacagggtcgccatctcagggtccatcagtttatccaggaaggagagcaggttcttgagttcttcttccgatttcaccgttgatttagggaatgccagaatcccggagttccccgtctgtcctgcaacacgatctccgttcgctccaagcaaaccagcgatatctaccacaccatccggattgtttttggacagacgctcttgctgactttttccgttctgagcaacaccaacacggataccgacaacaccggaatcatattttttctccgcttccgtagagtcgaatacggcaaaatcctggttcagcagtttctcatcgtacaaacgtttcagcagatccagcacctgcatatattccggtgtcatgaattccggcgtgaagctgccatcatcctcgactttccacttgttaggtgcaccaaaacttacaccaaggcgcgtcgtgaaggaatattgatcctcattatattttttgaaaagcatcagtccaaacgtattatcctgaccatctccatccggatcggaggttgccagtgttttgatcgtttcataccattcatccggtgtggctggcaccttgagattcagcttctcgaaccagtccttgcgatagatcactgtagcccgcgcaatatcggagaaaacaggaaccccgtagattttgccctctaccttgatgttgtcaaaaaaacgctcgttctgtgccgacagatttttgtaatctttcagcaaaggccccacttcccagaacacgtcattacgcatcgcgctggtcaccgttgggttatattgcaccttcacaatttttggcatatcgcttgaagcgatcatcacgttgattttgtcattgtaggccgaagccggaatccactggatatccagtttggtattggtatacgcttcaatcttttgctgaacttcattgcctttgcttggcacatcacccacctgtgcaatggctatggacacattttgtacgccgccttcggcagcctgaccctcgtctgatccgcatcctgccagcaaacctgtcaccaatgccagtgtgctcaagacagctacggctttcttttttgttgctttcataacatgaaaacctccctttttttatgcagtcatactgaattgactttgaaccatgtgacgactcaacctttgaccgaacccagcatcacgccttttgcaaagtgcttttgcaggaatgggtataccagcataatcggaattgtggagaatacgataaccgccatgcgaatggtaagcggctggatctcggtctcttcgatacttgtgtctccgattcggctctgtgccagaatgacaatctcacgcagccagacttgcacaggccacttctcactatcattgatatagataacagcgctgaagaaactgttccagtgggccaccgcgtaaaagagtgaaaatgtcgccatggctggcatggacaatggcagtacaatccggaacaatacgctgacatcgttacatccatcaattttggctgcatcctccagttcgtcgggaatggcctggaagaagtttttgagtacgatcaagttaaatgcactaatagcggtaggcagcattagcgaccacaacgtatccgtcaggtgtaaggatttcacaacaaagtatgttggaatcatcccgccactgaacagcatcgtgaacaatacacccagcaaaataggctggcgtccacgcaaatatcttctggagagcggatacgccataagtgacgtaaacagcaggttaatgaaggtaccgatcaccgtaatatagaccgatacacccagactccgaatcaaagtatctgtagagaaaatgtaacggtacgcagccagagagaactcttttggaaaaagaatgaatcctcccttagccacttcatgcggactggtaaacgagacggccaaaatataaatgaacgggatgaccgtcacaattccaatcaacagcagcaagccgtgattgagaaaatcaaagatccggttgccccacgttttatcctgttgcattttaatgttcactcctgtctggtgaagaacgtctactcccgagggttagtagacgccttcctccccgaattttttggccagcgtattggcaccaagaacaagcgccagcccgacaaccgatttgaacaacccgacagcagcgctgtaactgtactgtgcctgggtaagacccttcgtgtacacgtaggtatcaaatacctcgcccacatcccggtttgtcggagttagcatcaggaagatctgttcaaagcctgtatccaggaaatttcccagacgcagaatgagcaaaatgacgatggtactgcgaatggccggcaacgtaatgtgccaggtttggcgccaccgattggcaccatcaatccgtgcagcttcatagagctgtgtatcaacaccggaaagcgccgccaggaagataattgtgccccaaccaacttctttccagatggattgtccaacaatcatcgttcggaaccaaccgggttcaagcaggaacgccactttttgtccagtcaggttatagagcaattcattaatcgcaccaccctcagttgtgaacagcatgtagaacacaccgacaacaacaacccaggaaacaaagtgtggaacataaacaagtgtttgtacaaatcgtttgaaccgttcacggcgaacttcattcatcatgagtgccagtacaatcggcagtgggaaaaagaacacgatgttataaatggcaagtaaaaacgtatttcgaaataatgtccagaactgcggttctccgaagaaacgctggaaatgtttgaaccctacccagtcacttcccaagatgcccttgtaaggcgtgtaatcctgaaaagccatcgtgatgccatacatgggtatgtatttgaaaataacaaagtaaagcacacccggtattaacatgatatacagccaccggtttttgataatgtccctccacagcaggtttttgtcactgcgggtagcgggccgtgttcgagccgccgtttcggctttcatattgtcttcctccccacattggaaacgattacaaaatatcacttcctgaattcatgtcttcattgtggaggataaacgaatgactggctatcgtctcgttttagccttttgtttttccttatgtagcaaggctttagcccatttcccccacaaaatctaaaggtgaaatgaactgctttcaacctccatattcctgtcttaacttcatggagaaaagtggtcttcttccttcatttggacatgaaaaagcctgcctgccatggcaggcagagcaggtttgtcttatcgctgctgctcccggtacttgccgggggtggttcctgtgattttgcgaaatgtacggataaatgcggttgggttggtatagtttaatttctcggcaatctccgatattttaagatttgttgtttgcagccatgtcttcgctttttccatacgatactctgcgagatattccgtaaaattaactccagcttccttcttgaatacccgacttaggtaaacagggtgaaaattaagctcagcggcacaggcttccagcgacaattcacgatcataacgttcctcgatcaaacgaatcatacgtctcgcaatattcatgtattgggactcttcctgctctcgccagaaacggatgacgggcaagaacagccgcttgcggaaccaattggtcatttcgtccaatgtggacaacttcagcaaatgtgacatcgatgctttttcacccagtacttcagctacatccccgccctgctcctgcacaagctgatatacacgagacaataactgaaccataatgacggggtattcactgaaatgaagctttttgtctgcaagcagtcccaaatattgcttaaagtaggcgtccgtcttctcctcatctccttgcttgagcgcagacgcaagctgatcctcgatcatacgtaactgggtatacaacgcggcttccatctgaccacgtggctgtatatcctcgtaatgcaaaataatacggctgcccagactgacccggccttgcagagcctctcggctctcctgaaccgctcttggcgtatcgccaatacaagagtagtaacgactgatgccgatacttacgggcagattaagataagttacgacacgttcacgaatccagtctgcctgggtatgcatccattccttcagctgcacctcatccgtcagttcggaggcaagtacggtgacctgagcatcatccagcatgaccggggtgaaccgaactgccgaaggaaggagctcacctaccatattgttgacagcaaacagcagcagatcgcgatcctgttcctcatatcgggtcccttccaaggtatcgatctggagcatgagtacaccaagactcgcccagcctgtcgggaaatcgtacaattctccctgatatctgaaatcttcttccgagattttacctgtcagcagtttggtcataaaaaactcctggaggtgcacatgctgccccttcatctgctcacgcatcgttttctccgaactgaacaaggttgacaattgctcctcaatatagataaattcatcttgacggcgtcctgacggggcaactggggaatccaaacccttcgtaaattgcagcagtctggagattggtgagtacatccgccgactgccgtatatggcgaacaatcccgttacacacaacatgaccagtgtagcgataccggtaaccaatgcaattttctgtgactgggccgtgatctgtccaagagatacaacggacacgtataaccagccattgagcggagattgcctatagctaaccgccacttgattaccttcaacctccgcactgaagaaaccctctggctggcccgtcgtttgcaccatttcctgaatttccttattcagcgcgtcatatttcccgccttgctgcatatcgttcagaaaatacttctgctcccgatccagaacgtacatatctccagaattcgtatttcggctcaagtatgtactcagttccgtatcggcgatatcaattacaagaaatccctttggtttcacattggttggtatcatcgggattttgaataccatactgaccacattatccgatgatataagagcaggtgcctgttcgggtgttagttcacccatacctgctgacacaggtacactttctttggctgaactggcattctgagtgacccagaacaggctgttggtataacttaggtaggagccaattcggtctcgaatgctgaaatcatccaatttgccaaaagaacgcatcgaaacgacccaatcttcatccagattaaccagataggcttggtcaatgttcgtaaccgcttgcaagttgttaaaaccggaggtcagatcacgaatctcctgaaactcgctgctgtctagtggtttcttcatcgcttgtagtaccaagggcgaattaacatactggatggaggataattgcaggctgcgcagaacttgttccaccctcatttgggtctgatgcaatatctgaagattgctctcacgcactttctgttcaatgtcacgtgatgcaatcgtatacgagaccgaaccaataacaatgaccggaagggctccgaggatcagggtaaaacagagcaaacgcagtaaatacttcggcaagaagagcatcctcctttatacgtatgtttattaaaataaatcgctttcattggattattttactattgttattttaaaacccattcttattcaagtccactcatttattctaaaggttgacttcaaaccaatttccagtttatattggttgcatattcctcaatcaaaggagagatttttaatgtcggtgaatgttcttaactaaccaagtttcatattcaggagtttggcctttcattgcgcttgtgcccatatggcatacgtgtatttcatgatgcgccagatccctgtacttagttaagaacagcggatatcataaatcgcctccgggattgtaattgtccgggtctatttccgcgctgagttcagcgcggattttttaatatagacctgtagtggactttgctttcccatacgtttagggcggagaatgacgtttgttcattctccgccctttttgcgttttccaggaatatgtttcagcgcgtcaactgaaatcccaattcaaattcaaggagagattacgcatgaatgagaacacattaaacagtttgggctatccacaaattcaaaaaaatgttgcagactgcgccctgtcttatctgggcaaacgttatgcgagagaactaaaaccgatggtagatgctcaccttattcagattcgcctggaagaaactgcagaagcggctgcgttgattcgcttcggggccagcatccccctcccttcactcgacggaatggaaaccattatggatctgcttggcaccggttatctattcagtgaacgcgacttcagtcatctcgctcagttcctgcggagctgtgcacaacttatgaaatacatggagggcaaatccggggccgctcccaccgtcagtcgttatgcagcatccatgattctaatcgaacctttgctgagtgagatcgagcgttgcatccatagtggacgcattcaggatcaggcgagcaaggaactgattcgtattcgtaaaaaaataacggtgaatgcggaacgcatgaaacgaaaacttgattctctggtgagtaaacatcgctccattatgcaggaacatgtcatcagccaacggggaggaagaacggtgctgcccattaagaaagagtttcgcaaacaggtgaaaggcagtgtgctggatgaatcggggagcgggcaaaccgtgtatattgaacccgttgaaatagtaagtctgcagatggaattggctgctctacaagccgaggagtcccgagaggagatgagaattctcggtgatttaacctctctggccgaatcgtataaccgtgaaatcaccctcaacaccgaaacggtaggtgtattggacttcctgtttgccaaagccaaatatgcggccaccatggatgggcgtaccgttcgagtcaatactcagggccacattagccttcaacgtgcacgtcatccgttcatgggttcttctatggttcccctcgattttgcaatcggcagaacgtactcgtcgctcattattacgggcccgaataccggtggtaaaacggtcgcactcaaaacacttggtttgttaaccctgatgatgcaatccggtttgcttattccggtcgaggaaggtggcgagatggccgtttataacgtggtagcggttgatattggtgacggacagagtatggaacaagcgctcagtacattctctgcacatattcgcaatatgattggcatactggaacaggcgaatacatcaactctggtgctcattgatgagatggcctccggcacagatcccggtgaaggtgttggactttctatcgccatgctggaggaacttcacagccgcggagcaaccgttgtggcgacaacacattttggtgaaatcaaacattttgcagctgccacgccaggattcgaaaatgcccgtatggaatttgacaccgtttctctccagccgctgtatcgattgcgtatcggagaagctggtgaaagttacgcctattccatcgcattaaagctgggcatgccacagcgaattatcgagcgatccaagtccctgtcagatcaaagtatttcgagagatcgtacattcgtgttcacgtcacctcctttggaaactccggtcctggcgcctgatcgttccgttgtagaagcagacggcccagcagagttatccaagtgggataagtggaagcaaccaaaagattcattaggtctccacaaaaagacaacaaccagagagtcggattctcctactcctgccaaaacttttcgcaaaggagatcgggtgtatgcggcctatcttaatcagtcgggcatcgtctgtgatgtcgaggatagccgtggaaatatcggggtcatgttacgtggacgcaaagtaaaaatccataagaaacgcctgaccctgcatatatctgccgatgagctttatccgggtgacgattatgacttggacattgtgctagaaacaaaggaaaatcgaaagaaacgtaagttgatgggacgcaaacatgtggaaggcctacagatcgaattaccgtctgaagagtagccgatgagagaaacagatgtggtgaactggaagtcatatatacagagtgaaatccataatcaccggcgtatttctgttatactgggaccagtatgttcaacttcagctcgtagctattccacagggagggaagaactgaatgtctgtagaacaagacaatcaagagcacatccatatcgatgttcttgtctgcccgttatgcggggaagctaatcgctgttcctatgccgaaggacatcctcattcggaatgctggtgtaaccgggctactttccccgaaggtgtatttgaccgcattccggcagagcagcgccgaaaatcgtgcatatgtcaacgctgtttggatgactatgccaataaaagccaaccaaaagaagagccacacagttaacaactgtatggctcttcttcattatgtctcatctatactattagcttacagccattgctcttacatttggttatactgggcaacagcctgttcaagcaccggatgatgctcatccatggacgtataatggtggagcgcagctgtaatccccttctggcggatcatgttctgtagttcaactgattccggatcatcggagacatcgaacttgcaggctgctgccatgcccatagccagataggtcgtttcgcttccatccgcatatgcctgaagggccgggcgaaccagacgatcattcggagacaacttacgcagcggggaacgaccaacacgagtaacctcatcggtaatatacgggtttacgaatcgtcccaatattttgacaatatactgctcatgttcttccgggttgaatgcaaatcgcttcaccagaacttttccagtttcctgcaaagcaccgtatacaatcgatttcaccttctcgtcggcaatagccttctgaatcgtgtcatacccgtgcacattaccgatatatgctgcaacgcagtgtcctgtattaacagtgaacagcttccgttcgatatacggctccagatcatcgacatatacgatgccttcaaccggtttgaatgcaggagccatctgggaacgatccaccacccactcgtaaaaaggctccacctgtacatgtagaggatcttcatgatgctgaataggcacaatccggtctacggccgagtctggaaaatagacatactgatctgcaagggaacgtaccttttcatcgagcagagcatatacatgctctttcaattgcgtactggctccaatggcgttctcgcaagcgataatgtgaagcgggttttgtaccggacccgaattcagtcttttctcaagtccctttgcaatacctggtgcaatatgtttcagcacgcctacgcccaccgcggttgtaatcagatcagcttccattacgttttgggcaaccgtctccagctgggttccatcgattgcatttacacctgtaacggtctcctgatccttgctctcgttggccagttccaccgtatactgcccccgttgctggagagccgttaccaaggtctgattcacgtcggagaaaacaacctcataccctgcacgggagaggatcaagccgataaacccgcgtccaatgttacctgcgccaaagtgtagggccttcatagatccatttcactttccagaatagttataacttcttcggctgttttcgccagacgcagagcccccatattctcatcctcagcacagatcaccgcgatgctagtcaagatctccatatgttccccgccttgagccgcgataccaatgaccatataagctttttcttcgccaaaatcaacaccctgtggatactgaatgacagagatacctgtggataaaatgaaagctttggactcctttgtaccatgcggaatagccagaccgttccctacataggtcgagacaatctcttcacgttcaatcatcttctcaatgtaatcagcggtaatatgtcccgcatccttcaaaatctgccctgccatgcgaatcgcttcgtatttgtcctgagccgtcgcattcatgatgactttatctgttgttaacatactcataatggttgacctccaatttcggttttactgcgataaaatcctaccagttcctgggacaggtaatgaatgagttcatccctgattcctttttccagcaatgtaatcatttcttcctgtaataacagggcgctgatctcactgagaacctccaggctttccttggataattctcggggaccaagcatcaagaggacatgggtaactcctgcgggatcatccggcgtacagaggagtggctcagtgagctgaaacaagctaatggacggcctgtagattccctcactgcgtgtatgaaacagcgcaagtcttgtaccgggaatcttctgactccccactgcttcacgtgcctccaaccgttttgcgatctcccccggttccttcagcacaccagatccatggagtacgttgcacatcgcatatacggttttatagaaaccgatatcttggttatccagcggatacacctgaaacttgccaataattcggacgatttcaactaaaatagcttccagtccatccgggtcggagtaacgacttgtcgtctgaacctctgcttcacggggtttattatgctgtcgttgtaatgttgttgttcggataaaatgacgcagactttcgctctcttctgccgtaagcagtggactcactttgtaatactgatgctcatccatcggcagatcaacagtggataacaccaggtcatattgatctgtagggattctggcagcttcataccaggagacgctgtccatgatccgaatctcaggaatctcctttgatagtcggctggaaagcatgcgtgatgatccaattccgcttgtgcacacgatgattgccctgatctcccgtttcagtgcacgtaatctctcgatggaagcaccaaaatgcatgaccaggaaaccaatttcctcatccggaacgtctgtgcctggccaagcttgccctacagattttttgacatcttcaaaaagtgaatcataatccttgcgaatctgctgcagtagcggattacgaattatctgttgcccttcaatccgctccatgacaggttgcatatgaccaagcagaccttcacgaagcaaacgatcctcatgaaaggcgtaatgcgttctcgcctgcatctgatcaatcagtgaatgtaccctgtccagtaaaattaaatcgtctattggcaacagccgcgaagaatgaatccgctgctctgtctcaactaatagtctgtgaaaataagcttgctcatcttgggagaatgtcagccccagctgggtcgataacacaccacacaagcgggaagccatataaggtggaaccttcatctcatcctgctctgcgacttcatctcccttgttctccaggggaggtatacggccaatgccaaagcctttacgaatacgtacaaccgctacggataattgaatcagcaacttcatgtattggcgttccgggatgttctccagccattcgatatctggttgccataacgcattttcgaccgtaagtacatcaccatgtccaatcatatccaacaatttttggtttacgatggagcccccttgttcaggttgtcttccgaacaggtcggattcatccaaaaattcgagagcaagtgcagctatggctgtgcgatgaatcgtctcacttccgttaatcttgacgccatatccacgtctgcgaaccagctttagtcccgcctgacgaatccgtgactccagatcgtccagatcagtggttacggttgatacggtcactttcagatccgaagccaaggcgagtaactttacaggctccggttcatccagcaggatgcaaagcatgaagagcttacgctcttctggcgtaaactctacatattctttaccctctagttgctggcgcaatacagccagatcatcggaactggcatcgattcggataccggttcctgattttttttccagcttcatgcccaaaggttcaagccattgttcaatcatttgcagctcccggtgaaccgttcgggtactgacctttacttcaacggcgatttcgccggcagttacttcatgtggatgctccagcaggaactccacgatttcacgttgtcttttggtaatactcatatctcagcctccggctcagggaaaacaaatgcgtgcaattacttcagacgttcaacgagcgcatcgtattccgggctttttaggaagttgtcgatggatatatgttctgcgttcggcgcaacggagcgggcacgatcggtcaatacttgttgtgtgatcaccacgtctgcatccggcgggatatcactgatagccgtattggtcaccgtaacgtcaatcccctctgccttcatcttcttgcgtagaatggaagcacccatggcacttgaccccatgcctgcatcacaggagaagacaattttcttcacgtctgttttgacggtagaagaagccatatctgcggctctgtctgcttcacgttgattagccgtaataccagcgtttggcagggttccttgactcttcatgtctttcatccgactggatgcggactccagatcttcgtccttttgtttacccgttttcagcaacactgctgcaaccaggaaagaaacgacggctgctacaagcacccctgcgaacatcggtaggtatccaccttttggtgttaagaagaaatacgcgataatactacccggtgatggtgctgaaacaagtcctgctccggtgagcatgaatgttaatgtacctgcgacgccacccgcaattgcagcaagaatcagaatcggtctcatcagaatgtaagggaagtagatctcatgaattcccccgaagaaatgaatgattacggcacccggtgcagaagatttggccattccgcgtccgaagaaacagtaagcaagtaagataccaagtcccggacccgggtttgattcaagcatgtataatacggatttccctaattctctcgcttgatctgttgcaattggtgtaagaatcccgtggttgattgcattgttcaggaacaatactttacctggttcaatgattaggttgaccagcggcagcaaaccaagattcattaagccctgtacaccggcagataatactttgctaatcgcttctacagcaggcccgatgcccagtagcgcaaaaattcccaagatcccgccaataataccggctgagaagttgttaacaagcatttcaaatccggctttaactttaccttcaatggatttatcaaactttttaatgatccatgctgccagtggtccggcaatcatggcaccgaggaacatcggaatatcactacccacgatgaccccgatggtcataatggcacccacgacaccaccacgctgaccatgcaccatcgtacccccggtgtaaccaattaacagtggcagcaaatatttgatcatcggatcgactagctgcgcaagcgtctcgttagggaaccagcctgttggaatgaacagagccgtaattaatccccaggcgatgaacgctcccatattcggcatgaccataccactcaggaatcggccaaaacgctgaacacctacccgtagcccacctttggaattggacgattggtccaaattactcattgtattatcctccttggatcaagtgattatgatttatgaaaggggtatcatttctcccctgctgtaatcctaagcgagaatgctctcctgttcaatgaaatgaaagcgtactttcgtcatgaacaatgatgacaacattaggttatgtaatcgttttacttgatgcataatggctgaacccattggtacacaaggattttcttgcctatgacttttgtcatttccagaatcattttctaaactatagcttggtccaatcaggtgatttacatccacaatctgcttcattccacattcaaaaccattcttggaaagcacaaaaaacctgtgcaagcatccggctcacacaggtcgaaacaatatgaagctcatatcatttaattataaaatatatgttaataagtacaagttcgttgatactattcttccgtatgtttccgatacgcgtctgcattcatcaatgtagacaatgctgctgtcagatctccctcaacacggatctcaatcatccagccttcctcgtaaggagagctgttcacaagttcaggggagtcctgcaacgaatcattcaccgcaatgattgaaccagtgacgggagagaacaagtccgacaccgttttgaccgattcgatcgttccaatgctgtcctctgcttttacattggtttcaaggtcaggcaattccacaaacacaatgtcacccagctgatgctgcgcgaactcggtaatgccaatacgtacagtatcctcccctacggtttgcacccattcgtgctcttcactgtacaggaaatcacttttcaattcgctcatcgatatccgcctcgcttttcattaatgagtacatgcgttctttgaccttaacctttttcccagaacatagcgtatgatatttttgaatcaaatgtcaagatacctcacaatttatttgctgaacacctctaaatcctgtaaccggattacactctttcttcatatactggtgaatattagaatagtaagcgtagtctttttaaatacacgaacaataaaataaaaactaaattaaatattcggttttaaatcattatctatgatatcgttcttgacatcggtagtggattcacgttttaatgaaaggagtaaatatgtttattggactatgttatacccgcggatgaatgtaaagggagagattacccgtgacacccgattcgggatgtacatgaggtaacgccgaaggagtaaaccaccgataagcggaggtgaatctctcaggcaaaaggacttttacgggacgcaactctggagagcatctattcgccctgtgcgggcgttatgatcacccaaggggaaacctgctgcacaacgcagcggggtaactctcaggtacaagggacagagccttagaatacagcgtgctacttggcatgccgattctttggcctgtccttttcctttttcccaaaaaacgaaaaacaggatgtagaatggcgctgccatagctgccttaccatacttatgtgatgaaaatatctagctgaaaatttaaaaataccctggttcattgatccacgattgtatatccggccggctgacggcccatgacgaggtgatttgatgtctgatttgcttagaacaccactcttcccactatatcagcaatatgaaggcgtacggtgcattgattttggaggctgggagcttcccgtacaatttagcggaatccagaaagaacatgaagcggtacgcgagcgtgctggactgtttgatgtatcccatatgggcgaattcactgtacagggtgagcaggctgaagtttttttgcaacaaatgatgactaatgatgtgaccacgctggttcccggtcaagcccagtacaccctgatgtgttatccagatggcggtgtggtggatgatctgctcgtgtataagctggaagatcagcattatatgcttgtggttaacgcctccaacatcgacaaggattgggcgtggctgcaagagcacttgatccccggcgtaagtatgaccaacgattcggagcagacggcgctactcgccttgcaaggtccactgtctgtagacattatcgggaaagttacagatacggatgtaagctcgattgaaccgtttcgttttgtgcaggatgctgaagtatgtggagtaaaattactgttgtcccgtaccggttataccggtgaagatggctttgagctatatgttcctgcagatcaggccgctgtggtctggaatgggttaatgcaagccggtgaaggtcacggacttgtaccgacaggcctcggtgctcgggatacactgcgctttgaagcaaagctccctctgtatggacaggaattgtcggcaaccatctctccgcttgaagctggtgttggcatgtttgtgaagctgaatgccggaccttttataggacacgaagccttgttacagcaaaaaactaacgggcccgcccgcaaactggtcggcatcgaagtgttggagcgcggtattccccgcccccactatccgatttacgccgaaggcgtacagattggtgaagtgacaacaggcacgcaatcacctacattgaagcgtaatctggggcttgccctcatcgacagcaaatacgctgcgctgggaaccccgcttgagattgagatccgcggcaagaaactaaaagccgaggtcgtgaagaccccttttcataaacggacacgtacgtcgaagacacctactcaaggagctgatcaagcatgagcaagcaccgttacattcccatgactgaacaagatcagagcgccatgctcgcaaccatcggtgtggatacgctggaggatctgtttcaggacattccaaaagagatccgttatcagggcgagctgcccgtatcctccaaacttgatgaatatgcgctgacacgtcacatgtccaaacaagccggcgccaacgccaatttcgaaacacacgccagcttcctcggcgctggcatatatgatcatcatgttccttccgtcatcaatcatgtcatttcccgttccgagttttacactgcctacacaccttatcagcctgagatcagccaaggtgaactacaggccattttcgaatttcaatcctacatctgtgaattaaccggtatggctgtagccaatgccagcatgtatgacggcgcaacagcttttgcggaagccggtaatctcgccgcagcagcaacacgtcgcaaacagcttatcgtatcccgtaccgttcatccggaagcccgtcaggtattgcaggcatatgcgcacggactccgtctggagattgtcgagattggttataaggatggcgtcactgattgggatgccctgcaagcagccatatccgacgataccgctgctgtcatgatccagagtccgaacttctttggtgccgtggaaaatgtgaagcaggctgccgacctcgtgcatgcgcacaagggcctgctcgttgtaagtgccaacccgctatcgctgggtctgctggaagccccaggcaagctgggtgccgacatcgttgtaggtgatgcgcagcccctcggcatcgccgcttcactcggcggtccaacatgcggatatttcgctgtatcccagcctcatatgcgccgaattcctggccgaatcgtaggccagaccacggatcgcaacggcaagcgtggttttgtactcacactgcaagcacgtgaacagcatatccgccgcgaaaaggcgacatccaacatctgttccaaccaagctttgcttgcactcagcgcatctgtgtatatgtccatcatgggtaaactgggtatgatcgatgtcgcggatctgaatttgcaaaagagtcattacaccctgaatacattaactgcaattcctggagttagccttacttttaatgcaccaacatttaatgaattcgtgattaaacttcctgaaggaacagacgtgaatgctcttcagttgaaactgctggatgcgggctttattggtggctacgaacttggacgtgattatccggagcttgccggacatatgctgattgctgttacagaacggcgcactaaggaagagattgacgaattcgcacgagcattggagggatcgctgtgactcaggaaacgacgacaacgacaacatcggtacaaggacaatcggaagcgagtacagctgtctccacttcggctcaatctgtgttagaaaaattcaacgcacagaccttatctcctgcttcggaacaatcattgatttttgaactcagcagccctggacgtgtcgcttattccttgccagaatgtgacgttcctcgccagtctgccgatacgttgattccccgggaaatgctccgttcggaagcagcggcactgccggaagtgtttgaggtagatgttattcgacactataccgctctgtcccgccgcaacttcggcgtagataacggattctatccactgggctcttgtacgatgaaatacaatccaaagattaatgaggatgttgcccgttataacggttttgccaaaatccatccgtaccagcacgaatccagcattcaaggtgcactagaactgttatatacgttgcaaaacgaccttgcaggtctgacaggtatggacgctgtgaccttgcaaccagccgctggtgcccatggagaatggactggacttatgatgattcgtgcctaccacgaaggtcgtggcgaacaacgtaccaaagtcatcgtgcctgattcctctcatggtaccaacccggcaagtgcaaccgttgcaggatttgagactgtgacaattccgtcccgtgcagacggactggtcgatctggacgcgctccgtgcggccgttggttccgatacggcagcattgatgctgaccaacccgaatacacttggtttgttcgagaaagacattcaggagattgcatccatcgtacaccaggctggtggcttgttgtattacgacggagccaactccaatgccattatgggcattacacgtccgggtgatatgggctttgacgtggtgcatctgaacttgcacaaaacgatgagtacacctcatggcggtggtggaccaggtgccggaccagttggtgtgaagaatcgcctgattccattcctgcctaaaccaatggtgatcaagaatgatgatggtatgtatgcattcgatcgtgaaggcgatcaatccattggccgggtgaaagcctactacggtaacttcggtatattggtacgtgcctatgcctacattcgtacctatggaccggaaggattgcgccgtgtatctgaatgtgcggtactcaatgctaactatatgatggcccgtctcgcaccttactacgagattccgtatccgggtgtatgcaaacatgaatttgtcatgtctggtcgggggttgaagcaatacggtgtacgcacacttgacgttgccaaacgattgcttgattttggatatcacccacctacggtgtacttcccgctcaacgtggaggaatgcatcatgatcgagccgacagaaaccgaaagtaaagaaacgttggatggattcattgatacgatgatacggattgccaaagaagcggaagagacacctgaattagtcctgaacgcaccttatggcacaccggttactcgactcgatgagactaccgcagcccgcaaacctgtactgaactgcgcttgcagttaaaactaagtgagtttcttatccatgctcttgctgatgttaactacaccagtaagagcatttttttggctagacattacaggacttttccctcgtactctcctttatttcctatacatctacgcaacaaaaaaagccgatatccacaatgaatcgcggatatcggcaaaatcgctacatcaatgcagcttattatcggaaaaagaaaaaacctcaaatccggaggaaaccccggcaaaattacgcttgaatgctttgaaccaattcaacaacttgttcagccgtttgcatatccagagctttagcagccagttcctgcatatccgcacgggacaatttggtgatctgactacgagctggcagaatggaggttgcgctcatgctgaactcatccaatccaagaccaagcaacaatggaattgctgtttcgtctcctgccatctcaccacacatgccaacccatttgccttcacgatgcgctgcatcgataaccattttaaccaaacgcaaaatggctgggttgtaaggttggtacagatacgctactctttcgttcatacggtcagcagccattgtgtattgaatcagatcgttcgttccgatactgaagaaatccacttctttggcaaactgatccgccagaactgcagtcgaaggaatttcgaccatgattccgagttgaatgctgtcagaaacagcaataccttcagcaaccagcttctctttctcttcgagcaagacagcttttgcttcacggaattcaccgagtgttgcgatcatcgggaacatgacacgcaggtttccatgtacgcttgcacgcagcaatgcacgcaattgtgtacggaagatatccagacggtccagacacagacgaactgcgcggaagccgaggaatggattcatttcttttggcagatccaggtatggaagctctttgtctccaccgatgtcgagtgtacgaacaacaacaggtttaccttccattttttccagtaccgctttgtaagcattatactgaatgtcttcggaagggagcttgtctctgcccatgtacaagaactcggtacggtacaggcctacagcctcgccgccgttttccagaacacccgttacatcatttggtgtaccgatattggctgcaagttcaacatgaacgttgtccactgttaccgttggctcatcacgaagttttctccactctgcacgttgtgcatcatactgttcctgtttggcacggtattcagcaataacttcatcagtagggttaaccagtacgtgaccatccagaccgtcaacaataatcatatcgccttgtttcgcttgagccaagatgtccttggttccaacaacagccggaatctcaagagagcgagccataattgccgagtgagaagtacgtccaccaatgttagttgcaaaacctttaacaaattggcgattcaattgagccgtgtcggaaggtgttagatcctccgcaagcacaatcacttcttcattgatctcagccggactcatgaagtcgataccaagcaagtgatttagcacacgtttggtaacgtcacgcatatctgctgcacgttcctgcaggtatgcactcttcatgttctcaaacatggagataaattgcgatgccgtttcgttcaaagcaaattctgcattgatcatgtcatccgcaattctagctttaaccggatcaatcagttccgggtcattcaaaatgagcaaatgcgaagcaaaaatctctgcttttttctcgccaagctcttgtaaagtacgctctttgatcgcctcaagctcagcctgggatttacccagagctgagtcgagtttcgcgatctctgcgtcaacgtcgttaatttggcgtttttctacagagtaatcaggatgctccaagataaacgccttggcgatagcaatacccgccgaagccgcgatcccggagacattaagcattaatttcgcccaacccttcgttaaccataacgtcagtcaaagcttgaagagcttcagcttcgccttcgccttcaacgatgatgctgatggtgtcgccttgttccaatccgagggaaagaacacccagaatagatttcaaagttacttttttaccgttagcttctgcaaaggattctgcacctttgaatttgtttgctgtattaaccagggctgtcgccggacgtgcgtggataccatcttcgtctgtaattctgaatgtttgttgcattacaatcatctcactttcagtagtttggtttaggcattgcatatatttacacttgcttgccatcgtcgtaacacttcttattttatctcaatgattggctgttcgccaactttcagcactccactcttcttcagagttactgtggagccctctggcaggttagtgaaaataactggtgaaatgatcgaaggagcatttgctttgacatactccagatccacttccataatcggctgacctgccgataccagatcaccttcctgtaccagtacgttaaagccttgacctttcagcttcaccgtattaacacctatatgaacaagcacttccttaccaccatcggacatgatgcccacggcatgtttgcttggaaatacattaaacactttaccatacacaggagaagttatcgtaccatcatgtggcaaaattgcgaatccatcacctgtcattttctcagcaaagaccggatcaggtacgtttgtaatgtccagcaattcaccattgactggcatgacgatatcctcagcaacgatgcgctcgccctgctcaccttgtgccttctcctcttcaggagttggtttggcagctgctggcgttggtgctggagttcgtcctgcaattatatcctgcatctgagatttgatcgtgtcggaacgtgttccgaagatggcttgaacattattacccacttcaagtacaccagatgcacccaattgtttcaaacgatcttttttcacattggatttctcattaacttcaatccgcaaacgagtaatacaagcgtccagatgtttgatattctctttgccaccaaaagcttcgagaatgttatgtggcaggtcatccgttgaaccagagcctccgccagattcggtttcaggcgttgcatcttcacgtcctggtgttttgagattgaatttgcgaatgataaaccggaaaccgaagtaatagatcaccgcaagaaccaatccgacaataataacgtcccaccaaggtgtacggttcggaataatcccgaagatcaggaagtcaatgaacccaccggagaaggtcataccgatcttgacacccagaatttgcatggtcatgaaagacaaacctgcaaagatacagtgtactgcaaacaggattggtgctacaaacaggaacgagaactcaagtggctctgtaatccctgtcaggaacgaggtcagcgcagctgaacccatgatccctgcaacatactttttgtgctccggtcttgcttcatggtacatcgcaagtgccgctgctggcaaaccgaacatcatgaacgggaatttaccaacttggaatgttcctgctgtgagagcaacgccatcacgtaactggctgaagaaaatcttctgatccccacgaataacatctccggctttatttacatactcaccaaactcaaaccagaatggggagtagaaaatgtgatgcaaaccgaacggaatcaatgaccgttccacaactccgaagatgaatgccgacaaggtcggacttgtatctaccatgaagtgagatacagcattcagtccattttgaatcggaggccagataatcacaagaagcaacccgattacaagggatactaccgatgtgataatcggaacgaaacgtttacctgcaaagaaaccgaggtaagacggcagttcgattttgaaaaatcgattgtaacacagcgcggcggcaatacctatgataatacctccgaacacgcctgtacttaatgttgggatacccaagatgctggcataacccggtacttcaccgatcatggccggagtaacacctaccgcagatcctaatgtaacattcatgaccaggtaaccgatgatcgctgcaagacctgcaacgccttcgccaccggccaatccgacggctacaccgacggcgaacagcaatgccagattatcaaatacgatctgacctgcgttcatcataattgttgcgatcgagttcacccaaggggtgtcgagcgccgttacatattgcaagaaatctggattaaccagcatgttaccaattccgagcagcaaacctgccgcaggtagaatggctacaggcagcatgagagctttacctactctttgcaatacaccaaaaagctttttgaacatcgcgtcgtttctccctttcgtctaatttatatgttgtgatgcaagcaagggaacacaaaaaaggcatgaattaataaagtaaactgtgccaaccttggggtatagcataccctgtacaaggaaagaacaatcacactttaattaactcatgcctgatcgagtcagtaacacgtcgcttatgtttattcagttgcttgattacggaaaccattgtagcaccagttttaatctattgcaagcctttacaccaaaaaaataaattccgcattccatcactggaatgatctcacttattctcttcttccttccgctgattcagcctttgcagatgaatggtcagataacctacctctgcaggataaaccggcagtttcagtcttttctccattactttggtcagtttccatgcaagcgagtacatttcgggatactccaacttaagcagggaatccaacttatgaagctcttccactttgtctccacggcgaacacgctcaagggcgaaccgaagatgagtcagcaaacgagagtaatcaagcgattccgtttcaaacgaataatcgagttgatcagacaccaggttcaccaaatcagtgatcaattgcgaatgttcacgtacctgggatatattttgattggtcattgcgctatagatatggagggcaacaaaaccaatttcatccatccccagatctacacccattttctctttgatcagacgaacagcgtattctcccattcgatattcttcaggataaatctcgcgggtttcatataaaaatggattttgtatgataatgccctgctccttgcgttttaacgcgaaagaaatgtgatcggttaatgcaatatggatatgttcattcagaggaacgtccgtacgctctgcaatatacgtaataacttcgttaataatctcgatcagtgcttcatccacctgtggaagaagctgtttgtactgctcttgctcctgctggtttttcaaaatgaacattttctccacagccatcaatggaatgtgatcactcggttttcggttaaagccaatgcctttaccaataacaacgacttccccgtgttctggatgctgtgcaatgattacattattatttagcgctttatctacatgcaagctgctcattgtttgcacctctttttcacaccatcttaggtgtgattaagtcacaccctgttacgaacgaaaagacacctggagcgggcaaaccgcgccggacgtctcgcttaaaaagtaacaaaaattcgccttaaggtcaatagagcaaccatgcaagattcgaagtgcttcttactcgtcaactccagctctttccacaatcttgtcgattatagaaggagttgtaacagcctcgctctgttgaatggcaactggcgcaggtgttttagacttcgtaaggcctttaatcagctgctctacatcgatgccggatacacttttgagcatctctggagcggtcgccataagttcagtaacatagttactcactcgtgccgcaccttcacctttacctgtatctaccaccgtcagtttatcaatggatgcaattggctctgcaattttaccagccagttcaggcagcattttgacaatgatatcgagtacagctgcttcgccaaacttctggaacgcttcggccagtttttcttttgcttctgcttctgcaagaccacgcaaacgaataacttctgcatctgctgtacctttggcaagttccgcatccgccatggcctgaccttcaagtcgcttctgctcagctgttgctttggcatgtgtttcgatggaatactgtactgcatcagcttcacgcattcttttggctttatccgcttcggcagcctgctctaccgcataacgatccgcttctgcctttttcttcacttcagcatcgtattgtttctcacgtacgacgatttctttttcctggaggtcaatctcacgttctttacgaacgagttcaaccttcatttcttcctcaaccacagtctgtctcgcgcgcgcttcatggatatggtaagcctggtcggcttccgctttggctgtatcctgatcccgcttaaacgtggctactttcagttctttctctttggctgcctcagcgatattggtatcacgcagcaactctgctttttgaccctgctcttccgcattggccttctgaatacgtgcatcacgcatcgcttctgcttcagcaatctcggcatcacgcttcactgcggcaattctcggtttaccgagagcatccaggtagccctgtttgtcacgcacatccttgatggtaaatgaaacaatttgcagtcccattttcttcagatctctagctgctacgccttgaacctcttgcgcaaaccgatcccggttccgatatacttcttccaccgtcattgtaccgaggatggcccgcaaatgcccctccagtacctcctgtgcttcgcttctcagcgcttctacaggtttaccaatgaattgctcagctgccgtagcaacgtcttctacagcgcctccaaccttgataatagctacaccgtcagcaataaccggaaccccttgctccgtgtacacttcaggtgtggagacatccagcttgtgggacaataaggagataaactcggattgctggaatatcggcaggataaatgcaccgccaccacgaacaatcttaattttccgtccagaatcatcatcggagatatttttgctacccaggaatgatcccgtaacgatcattgcctcatccggtccaaccgttttgtatctcgcccagaaagccaaacctaaaattagaatgactccgactacaactataggaatcaacaaaacatcccaatctaaattttccattccacatctctccccttattcattcatgatgagtgcttaaactacttaggtgataagaatactttataaatctttaagtacattttcatcccattccgacacacgcagtacaccatctacaacatccactacgacaacacgtgctcccgccgcaatggggaggtgttcaaaactggatgccgtttgaatcgtactaccggatgcaaagcgaatcatgacttcgccaaaacctttttccggcaccggaatggtaatttcgccaattttcccagataactctttcatcgaaaatgcaatcgagacatcgctgttacgcatcggtttgatatatgcgaagaataccaacatggctgcagcaacacctataagcagggatagtattagacccgacatcgcacttaatgaactataacgtgtcagcataatgcctgccccaccgaaggttgtaatggaaccagctaacacaacgggtttgaaaaaatcaagacctggcatttcgaaggctccgtcaatcaagccgtcaatcaagtcacccagcacaaggctgacaacagcaaatatggctcctccgatcagacacccccaataaattgtctccatcccctgttcctcctctctctgccgcaaattcatcctaactaggcattccacatgtaaataaatacgtagctaacatcaaaatgtttcaaaatctttcctcaaatgtattctgaacccgataatgggtattatcacgacattctgttcttcttgcttcatgttcctccatcattcacgtgtacagcccgaatacatgaaaaaaccgcaagcccccatgaaggagacttgcggttattggacaacaggatgtgtccgttcacttgtcagtgattatagaattacagagaagccttgtagatggatacaacatcttcccgttgcagtttcttgaaattaccgaatgggccaaacagcatcgctttgtctgccattacgtcgatctggctatcatcgatatcgtaatcagccaaacggttaggtgcaccaatggatgtccagaatttgctgagcgcatcgataccttcttcggcaatctgtctgtcagacttgccttctggattcacttcaaatacattaattgccagacgtttgaatcgatccacattcacatccaggttatgtttcatccagtgtggaaacaagattgcaagtccaccgccgtgtgggatatcatacactgcggataccgcatgttcaatattatgtgttgcccaatctcctgcgagacccatattcagcacgccattcagtgccattgttccgcaatacaaaatcgtttcgcgcagttcatagttctccaggtcttcaaccagacgaggcgctgcttccatgacagtacgcagaatcgtctcacagaagccgagttgaaccggtgtgttggcatccagatggaagtaatgctccaatacgtgagacatcatatccaccatgccgtataccgtttggtccagcggaacagtgtatgtattcactggatccaggatagagaatgcagggaatgagtatgcgctaccccaacccaatttttcttgtgtatcctgattcgtaataaccgaaccggagttcatttccgaacccgttgccgccatggtcaatacggtaccgagtggaagagcatcctgtgcaacggctttgcgctgagcaaaatcccacatatcgccatcatatttggcacctacagcgatagcttttgagcagtccagtacactgccgccacctacagcgaggatcaggtcgatgttatttgttttacagaggtctacccctttatgcaccgtagaaagacgcgggttaggttccacacctgccagttcagtcacttctgctccagcttccttaagcaaaccgatcacttgatcgtacagaccactgcgtttgatactgccgccaccatatacaagcagaacccgtttaccgtatttcggcacttctgttttcaatgcttccagttgtcctttgccgaaaatcagccgggttggattatagaattggaaagatctcatatctattgtcgcctccaatggagtttagaatttttgtgcaactccaattatagtaccctgtttatagaaaaacaaatcgatagtcactcactttataacaacccgttaatctccaaatgagctcgaaacatctcgctcgatgaaggcaaattctcagcatccacccatgtttctgaggcccataatccagcctgtttaaatgcccgcggacaatggataaaacactcttccacatctacaatgacagccgcacctatggttttaccactccagcccatactggcgatgaattcctcatccttagtaatggatgctgtgccattaatacgcagcacttcattcatacccggaatcaaaaagagcataccaataccagggttcgacaacatgttcaacaacgagtctatccgccgattgcctgggcgttcgggataaacgagccgatatgtatcatagactttcacaaatcctgctccatcaccccgaggtgacacatcactttttccatcacgatcggaggtggagaggaaaaataatggtgacatggatataaagttctgaacatgtgaatccacaaatgagattgccttgttacgcacatgttcatgcggttcccccaccatgccttgcagttcctctgcatctgtaatcaatggaatattcaatgccttcttttccaattattcgtccccgtttcttcattgataatgtcttcaatggctttccaccattatacatgcgggaactgacatcttccatttctgaaaacgaatatgagtgccgtcattgaaaataccgcgactccatgtgccctcggctcacctattgaagattcagtattgttaatctcatctaacagttgtactgtaaccaaaaggacttcaaaattcttaaaataaataaggaggttagtggattgaaaaaagcaagcatcttcgtctttgctctgctaatgttcctcgtaccctggggacagatggttatgtatgctgagccgaataaagaagaggatttcataacaagcaccaacgctcatggaatcacaataaacgactatgtgggcacttcgaaagatgtcattattcccgaaaccattggcggtcaaccagttacttctattggtgaaaaagcattttacagcgatcatttgacttctgtagttattccgcataccgtctccactattggagaaagggcatttgaaatcaatcaattgacctctgtcattattccagagactgtcacgactattggagacttggcatttgcatacaacctgctgacctctgtcgtcattccggatagtgtatccacgattgggaactccacattcactaacaaccaactggcctctgtcgttattcccgagactgttatgtcgatcggagatagcgcatttacaaacaataaactgactactgtcattattccagagaatgtctccacgattgggaactgggcttttgcatctaaccagctgacttccattgttattccaaatcgtgtctcttccattggacatgctacatttacagacaatcaactgacttctgtcgtcattccggatagtgtctcctctatcggggcgatggcatttgcggacaatcggctggcgactgtcttcattccagctagcgtgtcgtctattggtttctcagcgtttcatggcaactcatcccttattattactggttttgatccttcagaggctcaagatttcgcttactgggatgacattccctttcaaaaactgaatgtggtcgtctcctttgactccattggagggaacccggttgcagtcactcaagccacttatgggcaaaccattgtacctcccactcagcctaccaaggacgagtttttgtttgaaggctggtacatggattcggtatactcccttccctgggattttgccagagataccgtgactgaggacatcacgctgtacgccaagtggacgagttcagtgacaactgcgtccaaatatacgaataaggaagatcccatttccgctttgaccgtctcttttgactctcaaggcggaagccccgtttcctctgctattgctaagaataatcaagcaattgcgcctcccactcagcccagcaaaagcgggttttcatttgatggatggtacatagactcggcattatctcttccctggaattttgaccgagataccgtaactctggacataacactatatgccaaatgggtaaagactaatagctctgaaaaccatggtggtagttcttctttctggaccagtagctctattacggccgcatcatcccaggaaccttatacaggaacggaacttaaaaccgaacctaaacttaaagttgaacctaaacctaaagagccaacaacacctttgaccccagttgtgttcagtgatatttcaacccattgggcacgcttgatgattgaaagtatcgctgcacgtggtctgataacgggatatcccgatgccacattcaggcctaatcagccaatcttgcgtaaacacatggctcgtataatcaacggagcgtttgagctaccgataatccgaaaggctgctccctttgaagatgtagagcccacacatccctactttgaagctatatcccaactacaggaggttggccttattgatggattccatatttcgaacggcttaaatgatttcttccatccggatgctgtacttacacgggctgaggcagcaaaaattctggtactcgcgctggacctgccgctgatccaaacgagttcttttgaggatgtcccctcctcccactgggctcacgactacatagccacactggcccagactcgaatggttgtgggatatcacggacagttcaggccggatgactccctaacccgagcagagctagctgccctgatctatcgttcaattccaacagaacaaacgactggctcacaactccgttaaaaatcatattcagaaaaacaccagcccttgtattatgggctggtgttcatcgttatacatgtctattcagtgtatcccatgctgcttacaaaacgacggaaagcctggcgtcctgcttcatcatatttgtagacccctgcatgttccagaatctcggcgaatttcaagccaacttcctcttgtacaatggcaacggcttgttctttgtccagtttaggaccaaaccgttcaatcaattcttccgcccagcccagatgtttgctcaacacatgatcagaagctttggcggcttcagcaagtttggcatctccagcgaggatatccgcgatactgtccagttcttctttcaaacgacctggcaggatggcaagccccatcacttcgatcagaccaatgttttctttcttcagatggtgcatttcacggtgcggatggaaaatgccttctggatgcacatcattcgtgcggttgttacgcaagacaagatccatctcataaccaccatctgcactacgacgaacgattggtgttaccgtattgtgtggtacttgttccccgtccacttcactaaacgcttcgatatccacagttgaatcactgtagaccttccacgcttcatatacggcgttacccgcttcaagcaactctgcaggatcgtgtgaagccagacgcattacggacattggccatttcacgagactcaatgtaagtccaggtgcatccgcatggcggaagactgcctctggctgtgcattttgaatggcgaacgtatgacgtccaccctggaaatggtcatgtgtcaggatagaaccgcccacgatcggcaaatctgcattagatccgataaagtaatgcgggtactccccgacaaacgcaagcagtctgcgcagtgtatctttggtcagcttcatcggcacatgatcatgatggaaaatgatgcagtgctcgttgtagtacacatacggcgagtattggaacaaccaaggctcgttgttaagttccaacggaatgactctcagattctggcgggccgggtgattcacccgaccagcgtaacctacattttcacgacacagctggcatttaggatataccggcggcggaagcaatttcgccatggcaatctcttttggacttttctccggttttgacaggttgatggtaatctccatgtctccataagccgtgtcctgtgtccagtagacgttcttcgagatccgatccatacggatgtagttggagttaatcgacaagtcatagaattgagatgtggctgcctcaatgccttccgtctgctccgtgtggcggaatgcgcgtaccacttcagatgggcgtgccatcagatgacccatgattttggcatccagcaaatcacggaatgtatcactattttcaggaatgagtccaatggaaaatccataatcaatcaacgtatccagcatagcctgtgggccatcgggcacattcgtgtccaactcgccggcataaggctctgagaatccgaattgttccagcaagaggttgcggctgtaatcccaatccgcttcctcgattaattgtttctgcaaggcaaatgcaaccagacgttcaatggcatgcagtgcttcctgctgctccggtgtccgctctgtggcacctgctgcaatatgagtctgtgacataaggtgttcgcctcctagttttttccgtagccgtcaggacgtgattggtgccagctccaagcgctttgaatgacatcttccagattggtccattttggattccaacccaggacagatctcgcttttgcagatgaagctaccagcacagccggatcacctgcacgacgtggctcctgtacaaccgggatatcgaggccagtcacttttttagctgtttcgatcacttgtttcactgagaatcctgtaccgttaccaaggttaaacacattactgttctcacctttgcgaagataatctactgctcgcagatgcgcatcagccaagtcgcttacgtgaatatagtcgcggatacatgttccgtcttctgtagcatagtcgtcaccaaacacagcgatgtgcggacgttgtttcaaagccgtttgcagcaccagtggaatcaggtgactctctggttggtgatcttcaccaattttgccgctgtcatgagcaccggctgcattgaagtaacgtagggaaacgtatttgatatcctgaactttatcgaaccatgacatcatgcgctccatcatcagctttgtttcgccgtatacgttggttggttctgtacgatcgctctcttcgattggcactttctcaggctcaccgtaggtagctgctgtagaggagaagacgatgcggcgtacgttcgctgcattcatcgcttccaacagacagagtgtaccaaacacgttgttgtcataatatttaaccgggtctttcatactctcgcctacgagtgagttggctgcaaagtgaatgactgcatcgattgaattctcagcgaacagcttcgccagaatttctttgtcacgcagatccccttcatacaacttaccgccgagcaacgcttcacgatgccctgtctgcaagttatccagtacaacaacctcttcttcacgttccaacaatgctgctaccgtatgagaaccaatataccctgctccacctgtcaccaaaattgccattttacttcgcctccttcaattctttaacaccgtcgcctacaccgcatacataaaaatcacctttgagactggtacgcgcttcatatgcagcgcccacttcacttacaaaacgctcgacatcatcttcatgcacaagtgatacggtacaaccgccaaatcctgcgccagtcattcgagcaccaagcgtgcctggaatccgctgagcttcctcaaccataacatccaactcatcacagcttacttcgtacaaatcgcgaagcgattcatgagaagcgttcatcagcttgccgaaggattccagatcattgatccgcaatgcctccaccgatgcgagaacacgtgcgttctcttccacgacatgctgcgcacgctgtcttactttctcatccttgatctgatcctgtagtgttacgaactgctctggcgtcaattgagccaggtaattcagtgcaggcagctgttccttcaagatggcaagtgcctgctcgcattgggagcgacgttcattgtaagccgaatccaccagaccgcggcgtttgtttgtgttaccgatgaccaatttgtaggagcctgtacggaaaggaaccttttggtactccagtgtgtcacacatcagcaggatcgcgtgatcctgagcaccgtttgcgacagcgaactgatccatgattccacagttgacacctacgaactcattttccgctttctgggacagaagcgccagttgaaccgtatcaatatccgatacaccctccagagactgaatcgcaaatccggtgagtacctccagagatgcagatgatgaaagtcctgccccgttcggaatctccccgtggtagaggaagtcgtagccttttgttacatttacgcctttgccttgcaattcaaccatgacaccaacaggatagtcggtccattctccggttttctccttaccgatggaggaagtgtcttgtaccccttcataagacatgttcgtggaagccagttgcaacttgttgtcttgacgctcacgaatgatcaatgttgttccgaattcaagtgctgccggaagcacgtatccaccgttatagtcaatgtgctcaccgatcagattcacacgccccggggcatgaaacacacggatgtccgctccactctctccgtacttctcaataaacttttgtttcaattcagttacgttcattgctggtgcacctcgcctcgttgttgtggttttcttaatgttattatataagaaagcggtgcctcatgtaatgcaaccatgtgtgtttcatatggataaatgtgaccttaaggcttataatgatcggagcatcccagaaagaaggaaatgaccatggcagatcactcaaactcgaagaaagactcccttgcaccttctatagagaaaattcaggaaccaccttccggtaaaagcggagcactcagttattcggttgcctccaatcccgtctattatgaacaaggagcgctgcatgtcctgtttgccggggcaagccagacacttcccggtcacgccctcggacccaaactgtttgattattatctgctgcactatgtagaaaaaggagctggtacgttccgtaccgaactgcacacctacgagttatccgcaggtgattgtttcctcattcatcccgggcagctggtaagctaccagtcacatgcccgcaacccatggcaatatcgctggattgccttcacaggcagccaggctggccaacatgccgaggaggcgggattccgccccgagaagtccgtttttcatgccggaccctcttgtggaatatccaattggctatccgtgatgcaggatgcttttgccgagcgcaaagaaagctctcatttcacatcactgggtacgttatatatgattctagccgaagcacagaatcacctttcgcagggtcaaaccttaattccaggtgaatcctccatccgacgtacggtaaaacagatgattcagtatatgtccacccaatatgcctatcctgtctccattgaacaaatgtctgcgagtcttggatacaaccgtgcgtatctatcccgaattttcaaacaggaaaccggactttcgccagtcacttatctgctcaaactgcggatcgacaagtcgcgccaactcctaagagaacgcccggatctgtccattgaacaggtatctgcatcggttggactgccagacgcgttgtatttttccaaacagttcaaacgatttcacggtgaagcgcctagcttgtatcgagagaaaatattgtcccgtccactacatcaggggttacagcagaatgctcaacaaatcaaacggtgagcaacacaacggacggaacacgtacgacaaaaaaaggtgcattccgccattatggctaagatgcaccttttacactttatttatttgtcatcaggctctggagacaggatggattcaatccgttccaattcctctgtagagaaatccaattggctgagtgcagccacattctcttcaatctgggaaggacgacttgcgccaatcagcgcggaagttaccctgccattacgcagcacccatgagagtgaaaattgggccaaactctgaccacgggctgctgcaatctggttcagcgcacgcactttgcggagcgtctctggagagatgttgttttcattcaggaataccgacggtcctttggcacgtgagtcttccgggataccattcaagtatttgttcgtgagcacaccttgtgccaatggacagaatgcaatactgcctgttccatactcatccagcacgtcctgcaaaccatcttcaatccagcggtccagcagcgagtatttcggttgatggattaacaggggcgtacccagacctttcagaatttcggcagcctgtctcgtctgctctgcgggatagttggagatccctacataaagggctttgcccgagcgaacaatatgatccagtgccatcatcgtttcttccaaaggcgtttcgggatcataacgatgtgaatagaaaatatctacataatccaggcccatacgcttcaagctctgattcagactggataccagatttttgcgtgaaccccactcgccatacggcccgggccacatataataccccgctttggtggagatcaccagttcatcacgataaggtttcagatcctgggccagtacctgtccaaataactgctctgccgaacctgccggtgggccataattgttggcaagatcaaaatgtgtaatgcccagatcaaatgatcgggtaatcatattacggccattctcagcgttattaataccgccaaaattatgccacagccccagtgaaatcgctggcagtttcaaacctgaacgtccaacgcggttatatttcatcgtttcatagcgagtatcgcttgctacgtagaccattatgaatcccttctttccccaggttccgcctcttgtatccggtctataccggataatgcggttattcagtacgtacgtttaaccaagaatctggtccacattattcattacctcgccaatcggctctgtaatcagcaaatcagccctgctgtcgtaagcggtaggtgtagcgttgagcagaacggtatgttttccctgaaaatacgtaattaactgggccgccggatataccgtcagtgacgtgcctcccacgagtaacagatctccagaagacagtgcatcaatggaacgatacaatgtcgtctgatccagctcctcttcgtacagcaccacatccggtttgatcacaccaccacatgtggtacagcgaggcacggtatattgggactgtataatatcatttagcgtataaaactgcttgcaatccatgcaggcattacgatgaattgaaccgtgaagttcaaaaacattgctgctacctgccttctgatgtagtccgtcgatattttgcgtgatcactgcctgaagttttcccgcctgctccagacgggccaatagtcgatgacacccatttggttccgcatctggatgaagcatttttccacgataaaaatcataaaaaatatcagcatgttgatcaaaaaaatgccggcttaataactcttccggtggataaggcgaatgctgctccgtctgatacagacccgcagccgagcggaagtcgggaatcccgctttccgttgaagtccctgcccctccgaaaaaaacaatccgggagctttcctgaatccaggcagccagttgttctgttgcgttcatcctctctcctccttttatttactatataaattgaactaaagaatatttacactgaccactccgaggacagaacaaccttccgatcgctgttatccacagattttttttgattcctttcctaaggggaaaatccgaggataaaggcgaacactccgtttcttcaggttatttctgtcctctccatttcgtgtaaatgttagttcaatttatatagtccaatcaggtcagggtgacttataaaatcacgcttatctcattataatgacgaataatggcatgggcatcaaccaggtgagatccttgatctaactgcggacagtaaccgagggtataggatacctctgcgtgacgccccatctgcatatccccattgctgtctccaattacaacggcctccgcaggatcgatatgtaattcacggcaagccaagagtgctgcttctccatctggtttgccctgggtcacccgatcacagcccacaatggaggtgaaaaaggaacggatccccatccaatccagatgtgtttctgctgccgctgtactgtctgaagtgacgactgccagaggtatgtctgctgccctgcaactctgtaagaaagcaagtaatcctggcatcggttcagccgatttgcgctctcttaccgatttcatggccacacttgaaaattggcgtatcgttgtgatcgcttcattccatggcatgcctgctgcatataactgcccggcaagcaatcccgtgcactcatccacagtcgcaatggcaagtggaccttgcggatcatagccgacaatgtgaccttctgcattatgaatagtgcccaggacgtgctcccgttcaaccgtaaatgaagctccaagctcattcatacgtgcttgtaactgactcagcaacgtctctgcccacggcccccataactggaggaattccagcagtgttccatctttatcgaacaggatagctttacatgggatctgcgctccattcacttgaagcatggtcatccatatcacctccatcaagttatgctataaatgcattcaacccttaatgcagaataatcaaaatctacttgatggtacttaaccaagccagtaccgtcttgaccgtctgattcagctgttcttctccactcacttccgcctcgccatctcctttttgatgaccataatcaccgaactgggcgtggttaccaccttcaatggtgtaatataccgtgtcttctggaagatacattcgtccactctgatacttcgtagcattcacgacctcatctttagtacccagaatagataaagcaggtattccaagtgactttgcgcttcctttttcatccgggtaagatgccaagaagaagatcccgtgaagtgcatctggatgtgcggctacataacgtgcagccatggacccgccgagagagtgtccacccataacaaattgttcttctggataggcggccagaatctcatctgccaagtttggcttaagcactgccaggttaactggcatcttggcaataatcgtgtgatgacccgcagcagccagctcatgcgcaagtggtgcataactttccggttttaccagtccaccaggatagaaaagtacacttttccccgtcggtttgtctggcacaaaatcaatccagttctcttgttcactcaccgtcaccggattggctgtttccatagccgtttgggctgtttcctgtggaccgtatggtgtgaataatttccacgcaacaaatccacatccaatgacaatgagcgccagaagtacgagcaggaatttcccgatgcccctcttcttgcgccctgtattataccgatttctcaacattaatcacctttcttcacttccgcaggtgccgcggctcacagaattgggagccttcgtccatcaggctcccctcttctacgaattaaaaatattattcagccttggccttgcggtaagcatccatatattgttccgctttgcgacggacatgactcaggtcacccgtcttcacagcttccgctgtcaagtcggagccgatccctacagcgactgctccacccttgatccaatcccccagattagacaaggataccccgccagttggcataaaattcgcctgcggcatagggcccttcatcgttttgataatcgaaggatcgtacagattacccgggaacaacttcacaatgtccacaccgagttccaatgcgcgttgaacatcagcaatcgtcatcacaccaggcagaattggaattcgatacaggttgcagatctgcacggtatccgggttcagggaaggtccgactacaaactcggcacccgacatgatggccgctcttgccgtttgcggttcaagcaccgttcccgcaccaataatcgcgaatttctctggatcttgtgtgttccaatggtatacacggcttaatttttcaatggctttgagggcactgggtactgtcatcgtaatctcgataactttaatgccacccgcaatcgcttgctcggccatggcaatgacttgatccgcagaatctgcacgcagaactgccacaaccccattgtccgtaatcttttgcaacagctgaagcttcttcatttcattctctcccttgtcaatgtggtggttgtgtatacaagccttacatttaagaacgaagatgagccatatatgatttagagcgactaacgctcaacatgggcaacgttgttcagcttggcctcgacctgcccccacgtcgggagcgcctcccaatcgccaacagcctgtataaccatggagccggtcaaattgccgagacgggttgcttcctgcggggagtatccttttaataaacccgataaaaatcccgcacagaaaccatctcctgctcctaccgtatccacaacataatccgccttaaagtacggaacttccgttagggtaccattcgccaatacataggtcaaatcagggccacccttcacgatgcacacagcattcatggcagataaacgctcaagtactttttgatcattttcttcgttatatagaagtttcatctcgtccagacccggtaaaaagtagtctgccagttcagctaaacgcagtaaaactggacgggcctcatccgcagaccatagtttgagacgcagatttggatcaaagcttactttcacccctgcctgtttggcaatatgtatggcagcttctaccgtagcaagtccggaggggcttatcgctgccgttatccccgtaacgtgcaatatcttcgccccggcaatatagtcgggatccagatcataaggtgtgatcgcacttgcagcagatagcttcctataataatgcaccgaagctttcccggaagcgttctcacgaatcatcaaaccagtgggctcgtcatcacttaaacgtactcgggatacatctacgccttcaccgcgaatggctttcagaatcatactgcccatcggatcattgcccaagcgtccaaaccaaccactggtatgccccaggcgggatacaccaatagccagattgctctcagcacccccgaaagacttgtccagtgtggctgcatattccagccctcttgtatccttggcagtcagcaaacccatactctccccaaacgtaataatttccgggcttggatagggactcgttgacatgatttcttccctccttatagttacattccctcatcttctttttctattgtcatcctctatgcaaccgttgtcaatcccgttgcgttcattttgttgtcacagctttgataaaagataacgcttactaatgtgaattaaatcacaatagataatgaacatccatattacccttattacagatgcaaatgaccttgcaaacagggtctataagggggctacaccatgaaaaatcagacactgatccgggatgatcaggaatctttcttttacaatctgcgctttatgcttatcgtctgtgtcctagctggtaatgcacttgaaccactcattacacgttttgcaggagcggaagctctgttcctgtggatatatacgtttcacatgccactctttgtatgggtaaccgggtattttgcgacacactcactccaaggtgcatctggacgaaacgtcctgaagcagattgcactacagtatgtactgtttcagtccttatacgcattgatggactttaccgtattccacacaccccatatgcggctatccttctttgcaccttacttgctgttatggtttctcgcgagtcatttctgttggcgactgttgcttcgtctgacgatttcctggaaaccaatatatcggctgattggatcgattgcgctcggtataattgccgggtatttgcccatcgacgggttctggctcagcttcagccgtacgtttgtatttctgccgttttttgtcatcggttatgactatggagcaaccatccgttcacatttattatccggttgggggcgaaaaaccgcagccatcctctctgctgcactgttggtatggatcgggtatggtggtttgaacatttcatccggatggttactcggcagcatgacgtacgccgaactgggtcaccacgaatggtatgccggtatcttccgggtgggtgtctacttgctggaaatcgcatcggcagcactgttcttggcttgggtaccttccttgacttccagactgacggaccttggacgacgtacactctatgtgttcctgctgcatgggtttctcgttcgtctcgcgatctggtccggagtctacagttatatgggaagctcggcgtatattccagtcatactggtcattgccgtactcttcgcagtcaccctggctctgccggctgtacgtcacacgttccaacccgtaattgaaccggatatatcccgattttctttcaatcgacatgaggtgtttaaacggtcggcctaatgctctgacggatctcttcaccatcgattctatcctagtgaattgtttcaggctggaaataaggtggtaaattagggatacgcgctacaaaaaacaacttatcgttgtaaggagtgatttgtaatggcacgtcaaccgacgtcagaacacaagatgagccgtgaggaagctggcagattaggtggcaaagcgacttccaagaaccatgatcgaagcttctaccagatgattggaaaaaaaggtggagaagcgacttcagatgcccatgatactgacttttacaagcagattggtcgcaagggcggcgaagcaacctccgaaactcataataaggaattctatcgtgagattggacgcaaaggcggaagcaactaatgaattccgcttgccacatcgaaacatgatcatagctttcccgcaaatcaagaagtctaattccatgaaaatggtttgaggcttctttctattgattgtagaaatatgacgacggttgtgatagactcaatagaaaaaccgggtgttcacgggtttaaagcagcaaagaatttcacaaactacggggagctcgacaccggcatgccggtccttttttttagagtacggatgaaattaaacgacagatgcactgccatttacttttccattcatgttgctcaatattatatatttggggggaatacaccatgtcagccaagaagatgcgttccgatatgatcaaaaaaggttttgaccgtgcaccacaccggagtttgctccgcgcagcgggcgttaaagaagaggatttcggcaagccgtttattgccgtatgtaactcatacatcgatatcgtgcccggccacgtccaccttcaggaattcggtaaaattgtaaaggatgctattcgtgaagccggtggcgttccattcgaattcaacactatcggagtagatgatggtattgccatgggacacattggtatgcgttactcgttgccaagccgtgacattatcgcggattccgtggaaaccgttgtatctgcacactggttcgacggcatggtatgtatcccgaactgtgacaaaatcacaccaggcatgatgatgggtgcgcttcgcgtaaacatccctaccctgttcgtaagtggtggaccaatgaaagctggtcgtgacagcaatggtaaagctctttccctgacttccgtatttgaaggtgtaggtgcttaccaggcaggtaaaatcgatgataagagcttgcttgaacttgaacagttcggctgtccaacatgtggatcatgttccggtatgtttacggcaaactccatgaactgtctggctgaagcgatgggactggctatgccaggtaacggaaccatccttgccgttgctcctgagcgtcgtgagtttgttaaacaatccgctacccaattgatggaactcatcaaaatggacttgaaaccacgtgatatcgtaactgtagaagcgatcgataatgcgtttgcactggatatggcgatgggtggatctacgaatacagtactgcacacgctggcactggctcatgaagcaggtatcgagtatccaatcgaacgtattaatgaagtagcgaaccgcgttccacatctggcgaaacttgcacctgcttccgatcttcacatcgaagacgttcataatgcaggcggagtaagcgcagtgctgaacgaattgctcaagaaaccaggcgcaattcatggtgactgcattacagtaacaggtaaaacaatccgtgagaacgttgaaggaaaagaaattcaggatacaaatgtcattcaccacctggataacccgcattccgaaaaaggcggcctggctgtattgtttggtaaccttgcaccacaaggcgctatcatcaaagttggtgcagttgatgcttcggttggcggataccataaaggtcctgccatctgctttgactcccaggagcaagcgctcgaaggtattgctaacggcaaagtaaaagaaggacatgttgttgttatccgttatgaaggaccaaaaggcggaccaggtatgcctgagatgctggctcctacttcccagatcgtaggtatgggattgggtgccaaagttggtctgatcaccgatggacgcttctctggagcatcccgcggaatcagtatcggacatatctctccggaagcagctgagggtggtccaatcgcctttgttgaagaaggagacatcatcgagctggatctgaacaaccgtatcatcgaattgcacatcagtgacgaagagtttgaacgtcgtcgcgcaggttggaaaggctttgaaccgaaagtaaaaaccggttacttggctcgttattccaaactggttaccaatgcaagcaacggtggcgtactgagtatctaattcactaataaataaagggttgctcttctgccaaatctggcgaagggcaacccttttcttttgctggtaagtgtgatcagtccgtttagttccgctctggcagtatctcttgttcaattaacaacgattcatctctggattcttctaccgttgctgccacctgcatcgtatgttgaccgtaacgttccaataatagatccagcggcatggcaatcatcttgggtaccagttgttcagtacgctgtttcaaacgtttggttcctgccgggtggattacacttaacagcagcttcaagtatactttggatgcagcactgaacggtccaggaggcaattcttgtatggtaaatccgaatttttctgggcctctgttaatcatactcacaccgtatatcgccttggcagagcgtaactcaggttcgagtgccaccatgcgtgccaaatccggcaattgctgttccatcgtccgaatcatgcgaatagccaaatgcatactggaacgtgacgtcactccaagttcaaacaatttctgattgtcaaaatgtagttctattaccggatctccattttgaatgacatggccatcattcatctccacccgtgctccgtgatatacacgtgatctgaagtgtagcattgggtcctctggcgaagccgtccgtagatgatatacccagtggaacaacttctcccagcccagccataaggcaacaacgattcgtttccatagcttcagtggtgtctgtaattgcgttttgttctgagattcgctcactatgatacctcccatcaacgtatcaacgcgtacgctttgcaggcctagccgttcagcttcctgtaatacgacttccagcgcctgaagcatctgctccggcgcgtgtgcatcagcaccaagggtcgttcctcgatcatgcagcagcatgacctctccgcctctcagttccttcagcatccgttcagtcaatctctgggcacctactcggcttctccaatcttcaaacatggaagaccacagtacaatctttcgttctttcttgctgaaaaaatcaaacaaattcataatcccccacggtggacgataataacaagtcttcacgccggttacttcatgaataatctgacctgttcgctgaatctgatcgcgaacggtacgtggccgcatgagccagttcgtcttgtgaatataattatgaatgccaataagatgaccttcctcatgtatgcgctgtatgagttcaggatgactcgctgcatgttctccaacgacaaaaaatgtggcttttgcttgatgctgacgaagcagatcgagcagtcttggcgtataatgtggatctggtccatcgtcaaacgttaatgcaaattgtgtatcacttcttccccgtcgaaatacacgaaaaccaaaaagcctactgatcaaacttggaataaaggcgtaaaaagatgaaagatacaataaccacagtaaaatactatgaagtatcgttgtcatgttgcaagctccccacttctcctgctgaattacggtgcactatggcactatctaaaataaaccgcctttaattttatcatagttcagacttttcttgaatcctgttttcccaaaaagatagctatcgtgtacaataaatacaatctaattattgccatcaaaggagccatgtccatgctaccgctttacaaaaaatacgggcgaactgtctttgacatcgcattgctcgtattaaccgtgtatgtgatcatgtacggtttcagtcaattgtaccatgtggctgcaccggtctttctatcattcattgtgtattggatgattgaaccgctggccaaatttttacatcgcaaaggattgcccaagacacttggagccgccatctccgtcttgttgtttcttgcattaattgtcgctgccttttttggggtaggcttgattatcatttcacagatttccaatcttcaagataattttcccgtatacattgaaatgatacagcgtgaattcaccaatctggtgttattcattcaggacaagtcagacgctctccctgatggagttatggaaaaagcgaatgattattttgcaacactgaccgggttcctgtccaaatgggtaactagcggagcgcaattcgtcgtaggtttcctcagttcattctcttcgtttattacgaacttcggaattgcgattattctggcatttttcctcagtatcgagattgaatcctggcgcaagttcgcccgtgcgaaaacgcccaaaacattaaagttagctattgaattcatgcgtaatcacgtgttcaaaacaatccgctcgtatctgaaggcacagatgatcatgatgctcattacgtttgtattgatttatgcaggtttgttgattttgggaacctctaacgcctttaccatcgcagcagtctgtgcggtttttgatctggtacccttgcttggcgttcctgttgtgtttattccatggatcgtctacttattcattattggcaatagtagcctggcgattggcctgattgtgattctggcagtaacgatgctgacacggcagttgctggaaccaaaaatatcgggtaactcgattggtgtatcctcggcgtacttgatgctttcgtttatgctgatctccctttcgatctttggcctggctggtgtagtgttatctccagtgcttctgatccttctgaaagaactgttacaacaaggatacttgcaaaagtggattcacctgccaaaagatgaatttgaatcctctccattggtcatggacccacccgttagtaaggcttcagcgaattctgccgagtctactgtacaacgtaccgttcctgcgaaggatcatgaggactccgccagatagtccatcaccttcctgaagagagccgtcgcctgatgttggctgtcaggagagacattttggacaagaacagctacagcatatttgggttgttcgaccggtccataaccaatgaaccattgattgttgcgcttctctccatgtttctgtacttgagctgtacctgatttccctgcaacatgccaccgtgcacgctgcagggattttcctgttccctcacggactaccttattcatccaggataacagtttatgcgctgttgcgggagcaatctgtcctgatgctgaaggtgaatcatgcaagggcatctccagcatggtgccaccatccgcatatcgaatgcgcttaacgagacgtggggcactaacttttccatcatgtaacagtgtaacgatcagattggcagcttgcagcggcgtgaccaagacatcgcgctggccgattgctgtctgtattttcgcaccttcatcagcagaagaaacagcctctgttctcacacgcccgtgatcctcatgatcaaagtgtcgtaacacaggcattcctgccatctgcttcccctcccagccaatcggacgcgcgagtcccagacgatcagccgtgttctccagttgttccatactcagcctgcgcgccgtttccgcgaatacgatgttgcaagactcagcgaatccttgctccagattcaggtctccatgcccatgctccttccagcaagacaacccgtatcttccgtactcaccaccgcaatggaattcttctccgttagaaaccgcatgatactccaatgcggcagccgcagtgacaattttgaaaatggaacccggtacggctccctgtactgcacgattcccccaggccgattgcttggggtccacatgttgtggctgatagaaaggacgggagatcatggcgcgaacatctgcgttagcggcatctaacacaacaatggccccttcttgtaatttagattcttgcgtcaactcctccaaccctcgctgtaactcagcatccacagtggtttctacacgtaaaggataatggctattggccggtgcaatgacgtgcggctgaatatcagggataatctccccaccacccgagaccatacgtgatacaagcgtagggccaattccccttaacagcggttcaagtgtcctctccagtcccgctgcccctgatttcatggcaaatggctgttttacttcatcctgatgcccagttagaactttggaggactcaggctgttcagccagataacccatccactgcattcctgtatgcccctgaaggtatcttgtcatcatcggatagatgccagctccttgcaggtgcaaactgcgtagacgctccacttgagcagcgttcaaatgaacaggctgatgtgtacctgctgtccagaaatgaggtatactttcctgattccattccttcttcaattgatccggatcggtatgtaatatagctgctaactgtatcatctcggagccttctaatgccccatccttgcgtaatttctctaatggacttgcctttggaaaaagaaccagtccccattgcagcttaccggtcaacacctcacccttgtaatccgtaaattgtccccgccccgggtcaagtatcaccccgcgttcacgctgcaatacagacatttcacgtaccgttcggtgaaatccaggcatcgtctgattcacctgaacgatctgaacccatcccaatcgtaatataagcaatccaaagacaagagttagaagaatacaagttatatagattcgccgtttcgcaaggagatgcatcccaatctcaccttttgtcgttttgacatattattgctgatatggcttggaattatccggtaaacaaaaagaaaacctgtcccatgtgcgggacaggttctcctcatttcaaccttggcttgttacaccgtaaagcgtgacaaagtttctttcagttcagtagaaacattctccagtttgccagacagattgaccagctggttactgatattttgctgttcactgctcaaggaagctacttcttgggacgttgcagaagattcttcagctacagcgctgacattgctcatggcttcagacaacgtaccttgagatttgttcaaatctccaatagaacctgtcaccatgcccagacgttccacaaaggcacccatctgttcctgtacggaagcaaagatgacgttggtgtctttaaccgcatccatctgttccttgaataaaggataagctgccgacaaagcatccacggtctcattcatttcagtcatgattttgtctgtaatctctccaaccatctcaatggattgtctggattgagccgcgagctgacgaacctcatcagccaccaccatgaatccgcgtccggcagcaccggcacgtgctgcttcaatggttgcattcagggaaaggatatttgtctgtttcgttatgttttgcagcacttcaagcactttcagaacagaagacgtactctctttcagtgaatcaaccttattcaccagtgcaccaatcatttcttctgtcttctgcgttttggtcatcaactgattcagatgttgtgttcctgtctgactggacttctctacatgacgagcagaatcacccatctgttcattagcagcgattacactctgcatctgacgagagatattgtcagttaattcattgccacgttccgcttcggttgccaaactgcccgcaccgcctgcgatttcttctgtagctacagcaatctccgaagcagacacagccgttttcttggatgcactgctcagctcagaggccgtatccaatacttcctgtgcagaacgattggtttgttcaaccagcttagtgatctgctccatcatcagattgaaggcggtcgagagctgaccaatttcatcttgggagctatatggtgtacgaactttaagattacctttcgcaccttcctgcatcaggtctttcaatttgccaagtggacgagcgatcatacgcaccatccagatcccgatcaatactgcaatccccgcatcaatcagcgccatccacagggtcagagtcagaataccttttgcgtcctgaaccaaaacagaggtaggtatcataccaaccagtatccaattggatgtgtccatcgtactgtatacagccagcatttccgtagatttgccatctaccgtatactccgtattcgtactacctgctggttcggtcaactctttgacaaatgcaagctctgtatcttgtcctgtacgatccgagatggaagatgcaaccactttattatccggagcaattagttgaagaatagctcctggccccagatcaagcgatttcaattgttcctccaaaacttccagtttcagttcaataaccagaacatacgactgagtcgtcccctgcaagtttttcatggaacgtgcaattttaaacgttggcgttgagccaccttctttgacctctgttggaagccagcgataaccgcccgcctcaattaactcactgtaccatgcttcctggcgaatgctgcccatggatgaactgttgctgccggtacccataatggactttgtatcgtccgtaggtaccaaataaatcgcttccatagatttatttgtaaatgcaacattggacagttgcttgttgattgaacttgagttcacgaatgtatcatacgcagtcaaattcgtatctgacattttttgtagcaaggactgcatttccggatcaaagaaaatctgtgtggatgtatcgacaaacctctccaaaatgatgtccattttttgcttggtctgatcaatggtctcctgattggcacgcgaggcatttttctctatcgtacccttggcttttgaataggataatagacctaaactcactacaaaaatcatgatccccgcaaaaaagatcaagaacagtttaacccctacggatttgaccggatttgccttcctaatttgtttgaaagaagaccctccaaggtttttccaatcccggttttttaattgtttttttacccaatcggtcttgatccagcccagcttcaatttactacggtcaaacttaagtaattttttcccattccctgtaattttacttttacctactttttctttcttcactttctgaacctgctcagggttaacctgctcggcttttgtcacttgctccccactgtctttctgcttcttttgaaccattcccattcacctgccagttatttacttgttggatttttctttctctcccctataaatatgtagtattcgacagctttcttcgttcccctttcactttccagaaatattttacaactttattcctatttttctataaaaaaaagacccccatctgccgataaacggaggtccccatgtaaatttcataacactatgttgttaaatcataatacaatattgacacattgtaggtatttgagcctacttcttttttctcatcatatcgaagtacgaaaccggttgatccaccttcattttaatcagttgcaacgggtgacgagcagcatctagaacattgccttcttcatcctgtatttcaccgacgacctgtttgaaaaagtgacctcccggaccgaaaaattcgatttcctgtcctggtttgaagtgattgcgctgttgaatggttgccattcctgtttcagcatcataccccatgaccaatccagcgaagtcaaaaggtacagccttttcttccggttcatagatatgatcttcatggtctggtgtatcatagaaaaatccggtattcagcgggcgatttgccgctttgttcatttcttcaacccattcaggtttcagaacataattttccgggtctgccatataggcgtcaatggcttgacggtatacgttaaccacggttgccacgtagtggatcgatttcatacgtccttcgatcttgaaactgtccacacccacatcaatcaactcgggaatatggccaatcatgcacagatcctttgatcccatggagaatgaattatcctgttcctcgaacaggggaagctggttctcacccagtttgaatggtgcaggtgccttcatctgcatgtcctcttcgctgacccacaccgtatcttctctcgcatcctcgaacagatcatacttccagcgacaagattggcaacagccgccccggttggagtcccgatccgtaaaatggttggagagaacgcaacgtccggaatacgaggaacacatcgccccgtgaataaaggcttcaatttcgatatccacattggccttgatttcttcaatctcttcaaagctggtctcacgtccgagaacaacacgtggaagtccttcatctttccagaacttcacggcttgccagttgagtgtggattgttgagtacttagatgtacctcaaggcctggcacagcacgaagcgctacttcaataatagccggatcagctacgatgatcgcagagattcccgcattatagaggttttgcaggtacgtttcgataccctcaacatcctcattatgtgcatagatgttcgtcgctacgaacactttggctccatactttttggcaaactccacaccttcacgcatctcttcaaagctgaagttatccgcgttggaacgcagtccataggcttgtccaccgatatatacggcatctgcaccgtaatggattgcaaatttcagtttttccagattacccgccggagctagcagctccggtttgtccagacggttacgtttccccgagaacttccgctgtaccgccactgtttccattctgttcacctcgtctattaatacacttgttctttatagaaaaatccaaaagacaattcacgttcagggtcctgtaacttccgcacctcagcgagccactcttcagagaacgcatatgcatcagcatcggctatataactgtcaatcgctgtccgatatgcacgtacaacagcttcattgtaggtgagtgattttaacataccttcaattttgaaactgtgcacacccgcctccatcaacagatgaagatcttcgaggatacatatatcctctgagctcataatgtgtgtaccgttaatgtcctcgtagatcgggaatttctcatcccgacgttcagcctcgatcaggaacaatccccgttctttgcccagatgtccctcaaccggccgcccttgatgagccatgtaactttgtaccagactgcgcttggaatgataaatattcgtcatgccatgcacctgaacctgagcttccaccttcagaaaagggaccatttccgtcaactcgtccatattcaactcacgggcaagcacaacacgactagctcccttggttccccaatagttggccgtcgcatagttcgttgaagtcatctccgcgttccagtgcaacttcacatgtggagcgtattccttcatggtggccagcacggatggatcattaaactccacaccatcaataccgattctgccaagtgcttgaacatattcaggcaattctttcaacagttcgttggacatcagattagtcatggatacatacacacgcgcctgatgtttggctgcaatggcaaccacctctgctgtctcttccacgctaaaactgcctggaagacgcatgccgaatcgatcatctccaatgaccagagcatctgctccagcctggagcagcacttctgcctctttcacattcgccgctgtaacgagcagttcatgtttcttactcatataatcccctccgcttattgcgcagccttacttttggctatattttgctggtgttccttatacgttttggcaaatagatgtccagacgagccatccttttttgtcacatagaacagatactccgaagcttccggatttagcgctgcctcaatggacggaagacttggactggcaattggacctggtggcaagcctttgttcagatacgtattatagggacttttcacctttagatccttgaaaaacaatcgttccttcggtctgtcgagcagatattgcacggtagcatcaatctccagcttcatatcctgattgatccgattgtatattacacctgcaaccagggcacgctcctcatccaccacaacttctttctccacgagtgacgcaatcgtcagcagttcatgcagggaaaggttcttttcctggagcttggcttccaaatcaggaatggaattaatcttggtctggaattcttccagcatccgtagcatcacatcatgcgtggaacttccctttttcagctcatacgtctccgggaacagatacccttccaatacgtagcgaagttcttcatccactggaatatctttgatgatatctacatcaaaggccgaaggatcattggccagcttgatgaattcatcccgatctacaacatgctcataagaaagcttacccgccatttgcagaacgttataaccctccggaatcgtaaatttcaccatttcttccggtaaaacttcgccactactcagcttgctaacaatctcatcatatgtcacgccaggattcattgaatatgtacccgccatgaaattagaacctagtttcttccactttaaataccctttgaaggttaacccacttcgaatgaggccttcttcttgaagctgatccgcgattttcgaagttcccgatccgctcttaatctcgaatacgatcggttctgtagaagcttccacaggacgcatcatactccatacgtaaccgcctgcgcctccggcaagaactacaatgataagcagtatgactacaattgctttccctttcaaaaaagaaacaactcctttacacaaccaaaaagagcggacttctccgccctcccggtttcttcaatttgaagctgatttaatcttcgtcaatggggagtgtacactcatcatacagttccgagatgttctcccactcatcatcatcgtcgatcgtaactaactctggcatgatctggtcttcacttccaggtgatacccgcagaagttcaacctcgtcataaggtcgcaacgaactgcggagcaccgcgtactgctgaccgttcacttcgaactcagccaacaagtcatacggttgtgatttaccgttctcttcctcgagctcaacatgagcaccgaatgccagacgcagtgaatctgtccatttcaggtctttgcggctatattccgtcatttagttcgcttcctcttcatcttcagcaagaaatgtattaaacgtctcctcgacgatatcccattcggcatcatcttggatgacgaaaagtttaatatcgtcgccctcttcttcataacggaatgcatatacatccgtttcgccatcttcaggttcaaccggagcaaccatcatgtacttggcctccgaaccatctacttcaaacttcatgatgacttcaaattcctcttcattaccctcgtcatccgcaatgtaaataatttccgcttcttcttccatacccagttgatcttcagccattgttgatccccctcaccttctactattggcatccaaataattttgcaaaatcaagcttgcggccattttgtccacaacctgcttgcgttttttccgactgacatccgcttcgatcagcgtacgttctgctgccatggttgtcagccgttcatcccaaaggtgaacaggtaaattcagttcatcccgcaggcgatcggcaaaagcaatgcatatctcaccgcgcggtcctacggtgccgttcatgtttttgggaagtccgactacgatctcactaatctcatgctcacgcacaagttcggcaatccgagcgaactcgccttcatcacggcggcgttctagcacttccaatccctgggcagtccaaccgaaggcgtcactcgcggcaactccgattcttcggtccccatagtccaaacctaatattttcatccatgctctcccatcctggggcctgctcaggtcgattacaaataatcgccttctcaagcttcaggctgtcttctgtcggttcatttcccgctgcctgcaaggctgcaacacagcggaagcggcgtacattaccggtgattggccagataggaacgtacaagctcttcaatcagctcatcgcgctcctttttacggaccagactacgtgcgttgttgtgacgaggaatgtatgccgggtctccggaaatcagatacccaacaatctggttgatcggattatactccttatcgaccaatgcatcatataccgtgagaagaatctctttggatgatgcttcctgttcgtcacctttcacattaaatttaaccgtcttatccatggagtccattgatgacacctcgctcctgcatgaacatggggaccatgtcctgccgaattgatttctgtttatataataacatattctgactgccacaagtaaacaaaggataaggcaattgtgttttttgcttgtcctttactggcttcagcatattgcatcattcgattccacacgctctcgggtacaaaaaataaacgaacagaaccatttcgatttattttttgacgattgaaagccactcaatggatttatgcattatgcccgctaaccagcgaaactgccagtttcagcgcttcatccagcttggtcgcatccttacctccggcttgcgccatatctggacgtccgccgccaccgccgccgcatattgctgcgacttctttgacgattttgcctgcgtgtaatccttgttttacttgttcagcaggtactgctacaacaaaattcactttgccgtccgctggagcacccaatacgagtaccgcgttaggcaattttaatttcaactcatctgccactgtacgcagcgcatccatgttcggagcatctacgcgtgctgccagcaattgtgtatttcctgcttgtaccacttgatcggtcaattgacccgcttccatggcactcagcttgctttgcagggattcagtctctctggctgcttctttcaattgttggttcagaccttcaatccgtttaggtacatcagccacatttgctttgagcagtgctgctgattgtttaagcagttccaactggctttccacatacagatatgcgcctcggccagttacagcttcgatccggcgtacgccggagccaattccgctctcgctcaccagtttgaagattccaatctctgaagtattatttacgtgacagccgccacaaagttccaaactgtagtctccgacttgaacaacacgtacaatatctccatatttttcaccaaacagggccatcgcacccatttctttggcttcatcaatagctttcagctcgatgttcacgttcagacgattccagatctgttcgttcacttgacgctcaatttctgtcaactcttccggcgtaatgctgccgaagtgagagaagtcaaaccgcagacgttgtggctctacgagcgatcctgcctggtttacgtgtgtgccgagcacatctttgagtgccttgtgcagcaagtgggtagccgtatggtttttgataatgtcgccacgtttcgctgagtctacttcggcgttgatcacatcacctacacgcagttcaccagactccacagtcaccagatgtacatgttgtccgagtggagctttgaacaaaccttgtacttttgctgttacaccagcacctcgcagcaagccctgatcactcacttgaccgccactttccgcgtagaacggagtcttgtccagaacaacctgacacgtctgtccttcgcctacagattcaacaagggcgtcaccagctacgatggctaccacttttgcttccgtcaacaggtcagtataaccaacaaactcgcttttaacctccagatcagcaagtggtccgccttggactttcatgctctcgttctcttgacgcccagcacgtccaagctcacgttgtttctgcatggaagcatcaaaaccttcacggtccacagtcagaccatgctctgcagcataatcttctgtcaggtcaaacgggaaaccgtacgtatcatacagtttgaaagcttcaggtccgctaataacggtgcgtccttcggatttggctgtgccgctgatatcagccagaatagccaaaccatctgtgagtgtttcgtggaaacgctcttcctcggttttgattactttggcgatgaactcctgtttgtctactacctcagggtagtacatgcccatcacttcaccaactgttgtagtcaattcatacaggaatggacggtcaagtccaagcacttttccataacgaactgcacggcgaagcaagcgacggatgacatatccacgtccttcattacttggcagaacgccatcacctactgcaaaagcaaccgtacggatatgatcggcaatgactttcagtgcaacatcaatctctacgctgtcgttatatttcacacctgcaagagcggctgttctttgaatcatcggttggaacaggtctgtgtcaaagttggaatccacattttgcagaatggaagcaaaacgctccaaacctgcacctgtatcaatgtttttgttaggaagcggtgtgtagctaccatctttgttatggttgaactgggagaataccaggttccatacttccaggtaacgttcgttttccccacctggatacatttcaggatcactcatgtcgtttccgtaagcttcgccgcggtcatagaagatctcggtacaaggaccacatgggccttcgccgatatcccagaagttttcatccaatttaatgatacgttcagcaggcagtcctactttttcgttccacagtttgaaagcttcttcatcttccggatataccgttacggaaagacgttccggatcgaatccgatccactctttgctggtcaagaattcccaagcccatgttacggtctcctccttgaagtaatctccaatagagaagttgccaagcatttcgaagaacgtatggtgacgacgcgttttaccaacattctcgatatcattggtacggatacatttttgggagttcgctagacgcgggttctccggcttctcacgtccgtcaaaatatggtttgagcggtgccatacctgcattgatccacaaaagagaaggatcgttgtgaggcacgagcgatgcgctcggctcgattttgtgacctttacttgcaaaaaactctatccatttggaccggatttcactggctttcatactggatgcccccattaaattataatagtccgttgcgtattcgctccggttggtcaacattgtttttgtaaaaataaacacaaaaaacgcccctgaataatcagggacgatgttatcgcggtaccaccctggttattgctgttcatcccttgctgcccggacaaacaaacaatctcctcgttcatgcgaaataacggtcgctcccggcagggttgtcctgcactccgaaattagctttccgccgcttcatctttcaagactcttccagccatcagttcaggctcaccctgatccgatgaagtctattctctgaggaaaggaaccctcggcgtactttatttcatcatcgatttcattttctcaacatacacactcattatatcggtagcacaagcgggtgtcaacgcggcctcgttgatgttttaaccctgctatttagtcggtccttcgtttgatgtaataggcgaaaaagtgttgcacaatcaccttcagcacggcaaaaacaggtactgccaaaattaaacctacaatgcctgccagttcacctccgacgagcagtgcaaatataatcgacagtggatgcagatgcaacgtacgtcccaccacctgaggagaaataacgttactctccaacacctggcacagtgtgttcacaatgacaacaagtagtaccattttaaacgatacggttgatgccatgaccacagcaggagcagctccaaggaacggccccaagtagggcacaatgttaaacacagctacaatgcttgcaagtagcagggcatacggcatatcaatgacgatataaccaatgtaggcaaagataccaacaatgacacagacaataaactgtccccgaatgtagttccccagtgcagtatcgatctctttcatcaccgagacaatcgctttccgacgtgaacgcggaagatacgccacaatggtgcgttcaaacacctcaaagtcttttaacatataaaagatcagaaatggcacgataaacacattgaataacacattaatggtcgccccgatattatccatgagcacagcaattccctgagttagtcgatcctccatctgaaaaaaccaactgttcatgcctgttcgcacacttggcggcattaatttgtgatccatattgttcatcaggctctgggcacgcatggacagttccggcatatgctcgttgagttcccccagctgttcaatcaataccggaatgacattcatcagaatgacaccgaggcaggtcaggaaaaaggcatatatgagtagtaccgcaatcgtacgcggcaccttgcgccctcccagcatgctgacaatcggattaagtacataggatatgataagggctacgataaagggtgccagcactgttttcaggaacgcatatatgtgaagcagtaaaggccgcagcagccatataaaatataaaatgatcaatccgagcagcagccagatcgcgtaacggaacagcttgtttttggttaattgctccacttgcatctctccttttggactggctctgagagtcagtatatgtaggaaaggtaatatttattaacacagcgcaaaagtggaaaggagtaatccgaacatttttttcttaaacccaaaaaacgcctccttcattagagaaggaagcgcattttgcagtacgggttagcatataatcaaccatacaccagcccaaccattatgtaaccgcatctatatacatctgccaacaattaacgacagcctcccatgacagacattgtcatgaaaccgcatatagaggaagttattctgcttattaagaagaagcgtgaagatgagggaagtcttgtggcagctcgtccccgaaaaacagatcatccagggaactcagcgtaccgtcttcttccacctgatatacagacattttctcaccgttcaccgttaattcgataaagcatccccagcaataaaactggtgggaaccaatttttccgatatctttggaactacagtttggacatttcatattcattcacctatccattaacagaatgaatggcattttccaagcgttgttcactcagagacggcaccataatggcactttccccgatggacatatcgcttgtacatggcagccatttgcggccctcgatcagatcggacacaaaaccgtccgtaatttcaatccctattattgtatttcccaactcttggtcaaaataaacatcggagacacgcccaagtagcaaaccttcttcggtgagcacggacatctccttcaatttagaccgaccgaggaggtacgtgtattttatgtcgtcggctcccgtcttgcggacagcctgttgattacggatcatgacggcatcttcgccgtaggcaacaatatcttgccactgcacgattttgacatgattggtaaacagacctttgttctcaagctcaatgccttcgatctcccaatcatcattcacaatgaaatcctggattttaccgacctgcttcccgtcctcaacatcaaaaacggcaagtccgatcatttcctgaagcttcatcgctgggtccccctcatcttcttatcattaaatagacgcggcgctattgctaggtatgcccaaagttgatgagtggcaatcagacgccgatcatcaaaaccgcttctatccaaccgatgaaatggaacttcttccctccttctgttccatgtgtaaagttccccttagggtctattacgcagtcgtccaagaatggttccaattttttcggcggttatcatgatttcttccgtagtattacccaatccccagctaaatcgaatcgcagagtgtaaaaatgtttcaggcaatttcatcgctttgagcacatgagagacttcaagtgaaccggaagtgcaggcagaaccgcttgcaacagcaatcccttccatatccagattcattaacatcgtctctgtggacacttccggaaagctgatattcaggatgtttggcagcgtatgctccaggtgtccattcacgtgaaagtgttccgtccccacatgaatttcaagctgttctaacaaaagtttacgcaattccaaatcatgctgacgatgcgcctccgtctgcgctgatgcaatcttgagagcctctgcaaatccggtaatacctgcgatattttccgtaccagcccgacgctgacgctcttgcaacccaccgtgagctcttgcttccagcacaattcctcgccgtacatagagtgcacccacgccctgaggtccgttgattttatgcgcagagaagctgatcagatccacaggcagttccttacaggaaatattctggctgcccagagcctgaactgcatcggtatggaaaaggatattatgctgacgtgcaagctcacccaccacgcggatcggctgaatggtgcccacttcattgttggcatacatcatggtaatcagcaccgtatccggccgaatggcctcttgcaactcatccaaatttattcgtccataacgatccacagatagataggttacttcataaccttgccgctccaattcctgacacgtatgcaagacagcatggtgctctattgcggttgtaatgacgtgtttccccttatcctgcctggatgagactgctccaaatattgccagattgtcactctccgtgccgcctccggtgaataccaattcgtccgggaaacagcccaaagacgccgcaatgacatcccttgctccgctgacagtccgtttggcctcacgcccaaaggcatggatacttgatgcattgccaaattgtcctgtcatgacgttcatcatcgcttctgcgacttgtggatgcataggtgtcgatgcggcgtgatccaaataaattcgtttcatttatcttcaccccgttatatgttaaatttctatctcatggcaaactgtcaaaattggaaactgaaacggatgctctattgtcacatcttcgtgtataatgttatatatccatttcaaaaaggagagagatacatgagtgatcccattctcgggcagattctgaatcagcttcaacaaatggacaaacggttcgacagcattgatggacatcttgaaaagatggaagacagactgaataccatggaaagcagattggacaccatagaggaacaaactaaaaacattccgcttcttcaacaagctgttttggaaacattgacagtcacgaaacgtcttgacgcttcccaatccgcctctgaacgcaaagtaactaccgaattgaatacccatcagcacagcattgatattttgaatcgccgccagttacgcatggaagctgatatagaaaccttaaaaagtcgctgattcacaagtgatccagttaagttcacacttgaccatcttgtaaatcccgcggctgaatacatagccctgctcaattaaaatgatctgtagaaattgaagaacaaagtacccattggcatgtctaaagcccccaagttgggggctttattgtgtcttctgtgatgcgaattaatgatcttaaatgtaaaacatgtagctgtcttttttgtcctgatcctggaaggtaatcaggtctttcagtgttgtggaatccaacacttccgcaatgccatcacgaatacgcaaccacagatcacgtttcgccggatcatcttcctctgtgaaatctactggagagattggcccttccagtacacggattacatcgcctgcagtcacggttgcaggatcacccgcaaggatataaccgccgtaagcacctctaatgcttttcaccagtcctgcattacgtagtggagcgatcagttgctccaggtaatgctccgaaagctggttgcgctcagcaatgcttttaagtgatgtagggccttcgcctattctggcagcaagctccatcatgattgtgaggccgtaacggccttttgtcgatattttcaaaggagtcacctctttcaattttcagaaacgattggaaactttatatttaatcctatggtccatgaccgtctgtttcacgatctatccacagcggagatgcattgagattagcataaaccttctaatcctccgtattccgatcataaccctcagctaatgttaacatatctgcatgctttatggaaaagaaagattgacgatattccaaaatgtgcgtctgtggtggacactatccaaaattggccgggtgtatcgtatcttgagtccggttatgctagaataagaaacgaaacacatttatatatagaaatggtgataacgatgtccaaaacaattgaaaatacacgggtcgtcgttggcatgtccggaggtgtcgattcttccgttaccgcactgttgctgaaagagcaagggtacgatgtcatcggcattttcatgaaaaactgggatgacaccgacgagttcggccactgtaccgctgaagaagattcagaggatgtacgccgcgtatgtgaacagatcggcattccttactacactgtcaacttcgagaaagaatattttgataaagtatttacctatttccttgatgaatataagtcgggccgcacgccaaatccggatgtcatgtgtaatcgtgagatcaaatttggtgaattcctgaacaaagctctggatctcggcgcagattatgtagctacaggacactatgctcgtctgattgaagaagatggcacactcaagttgcttcgtggtgtggacaacaataaggatcaaacgtatttccttaacgcactcaatcagaaccagctgtccaaagccatgttcccgattggtcatctgcccaaaccggaagtacgcaaaatcgcagaaacggctggtttgtatactgccaagaaaaaagacagcacaggtgtctgcttcatcggtgagcgtaatttcaaagagttcctgagtaactatctgcctgccaaaggtggagacatggttgatatcgcaaccggtgaagtcaaaggtcgccacgacggtctgatgtactacacacttggacagcgccaaggtcttggcattggtggttccggcaatggtgaaccctggtttgttgcagacaagaacctggagaagaatcaactgcttgttgttcagggcgatgcccatgcaagcctgtactccactggtcttaccgcaacgggtgtgaactggattgctggtgcagagcacatgcctaatgtgccataccgttgtactgccaaattccgctatcgtcagccggatcaaggtgtaacattgacctggcaggaagatggaagtgtggatgtacaatttgaccagcagcaaaaagccatcacgccaggacaagccgttgttttctacgacggagaggtctgcctgggtgggggtacgatcgatcaggtgcaaaaagtacctgtacccgcaatgcaataatagagcttgtccattaaaatgcggattatacacaataccgtgtatccctataaaaaaagccgtctttcatgtataccatgaaggatggcttttttcctgcttatttttgcaaaaaaataaaaaatagttcgttatgcagtcaaccagactcctgcccaggcggccaacaccccaactagaaccgaacttacaacgtagagcgccgcgcttgcgtatcgttgtcgacccataagtcctaatgtctcataaccaaaggtagagaacgtggtgtacgcaccgcaaaatccggttccccacatcacccagattccatctgagatcattgcagattcatgccacccatataacaacccaagcaacaatgaaccactgatgttgatgatccatgttccccatggaaaagccgttcccagcaagccagagacccattttcccagactgtaacgcagtaccgcacccagcacacctgcaaaaccaatccacaggatcatgaggcatcaccctcttgtctttgtgctcccaacatacgatgtccaaggctcattcccagcgcacagagcaacaatcctgccaacagactcacgatcatataaatagcggcactgatccattcgcccccttcggataaacgaacaatatccagtgtaaacgtggagaatgtcgtaaatgcgcctgtaaaacctgtaccaatcgccagtcgaagttgtggtgttattttgcctggaacagctatggtaaagaaccaacccaaaaaaaggctacccatcgcattgattaacagcactgcccatggaacccccccatggacagttggtagcgctaactgtatagcatatcgggttaatgtgccgagaaatccacccgcccctatatacaaaagctctttcatgttgtgtgcatctcccgagtgatctgactgatcttatagatctctgcgccgctgttggttcagcctgatcttcgattcgttaccctgctccgttgcctcatagaatactctccgtgagagctgctttggcaaatattcttgtttcacgtaatgccccggatagttgtgtggatattgataaccctcatgtccaagcttcatggcacccgagtaatgcgtatctcgcaagtgaagcggaacttctgccgattttacctcatcaatcgcgttcatggctttggaaatggcggtgtacaccgcattggattttggactttctactgcaaacaaaatcgcttgtgcaatgttcagcttggcttcaggccagccgttatttcggtacgcatcaagtgctccaatcgcctgagtcatggcttgcgggttcgcaagtccaatatcttcactgcttgctgcaatcaggcgtcgaataaaggtcatcgggtccatgccgagcttctccaccgcgtatagaaaccagaacagcgccgcatcactggaaccccgaatactcttgtgaaatgcagacaacacatcatactgtgtcgattcatccgccttcacaatggggcgccgaatagactcttcagctacgtcaagcgtaatatgaatggatccatccttctccggtggcgtcgtcaacgcagccagttcaagcgcattaagcgcacgccgaatatctccgttggccatcgtagcaatatgttcaagcgcctcatcgtccgcctgcagttccatgaaccccagacctttgtccgcatcactcaatgctctgtgcattgcaattagggaatgatccttatttagcgattctagctggaacagagtagaacggctcatcaaggctccattgacataatgaaagggattctctgttgttgcgccgataaaaataatcgtgcccttctctaccgctggcaataacgcatcctgacgtgaactgttaaaccgatgtacctcgtcgaggaacagaatggttttggttccatacagctgtttgttcgtttgcgcctgttcgatgacttcacgcacatccttaacggaagcttccactgcattcagacgtacgaactgtccttgcgtttgctgggaaataatatgtgccaaggttgtcttgccacatcccggagggccgtataacaagatggacgaaatctgatcagcctcgatggcgcgccggagtaatttccccggtccaataatatgttcctgtccaatatattcatccagatgctctggccgcaagcggtccgcgagcagtctagcttgtggttttgagtcctgttgaaacgaaaataaatccattgctcatcacttccttaacggattgccttgccttgaatacaattacacttctgatggttctccactctctatcatatcatactctcgcggtaacatagccataaatgcatgaagtgcactgctgacaaaggcatccttgcgagtaataaaatgagtcatcatgcgattcatacctacggggagtgtatgcgtgcgcaataatccattttcgatctgatgcctaatcacaatctctggtaataaggaaattcccataccggacgtaactccactaataatcgcttcaagggttccgaattccataattactgggcgggtaacaccacccacctctaaccattcctccaaaacctgacgataggaacaccccatgctgtagacaagaataggtttactcttaagatcttcatccgtaggacccataccagaatagacaacaaatagttcctcatcaaatacgggaatagaaacgatatcaggatgatcacagggacagcctataaacgctccctccaattcatacccaataacctgatccataagcatctgcgaattgccagtaaccagtgacaaggagacatctggatactgtttataatatctgacgaaaagttcaggtagtcgcacggccgctgcggtttgtgtagaccctattcgcattggacccgatggtgtgctcgtcgcccgaagtgccttggaagcatcattcagcaaaccaataattttatctgcataggtcagcaacatttctccggctggagataacgtcatgcctcggttatgacgaataaacaacgttgtacccacttctgcttccagatgccggattcgtgccgttacgttggattgaacataccccagtttagaagcagctttggtcagattcccttcctgtgcaacacactgaaatattctaagatccccgctctccatggtccccccactctgacatcattcaaaatgatatccgcttcattaccaatcattatacttcatgtgtaaaccggactacaattcatgtagatcccaaaccagtcatctgactggatgatgataaggagtgttcagcatgacatactggaaaaatagagttgctctgatcacaggtggtggaacaggtataggacgtgctgtaagtgagttgctcgctgaacgcggagccttggtcgctgtcaactattcccgctcacaagatgcagcaaacgagactgttcaacacattttggatacggaaggccatgcattcgccgttcaagctaatgttgccaatgattttgatgtccggcgaatggtcactacaataactgaaacctatggcccgattactgcactcgtaaataacgccggaatcacacaccatatccccatgcacgatctggagtctgttacagatgacgtctggaatgagctggttgatgtgaatgtgaaaggcatgtttcattgcgctcgtgcagtgacagaaggcatgagacaggctggcggtggttctatcgtaaatctgggcagcatcgcaggcagtacgggctcgggctcctgcctcccttacgccgtctccaaagcggcagttcatgggctgaccttatcacttgcgcacgcactctcaccacacattcgggtgaatgctatcgtccctggcgcagttgctacaaggtggtgggctggaaacgaggagcgaatgtatcgtcttggtggagaagtgttattacagcatattgcctcacctgaagatatcgcacacatgatctgtgctgcgctggaacagcaatccatgaccgggcaactaattactgtagatagcggacagacgttatgagctccagtcatgataaagatacccggatcataaaaccattgaaatatacactattgatcattttgacaacgttaatcatgggcacttcttttccagttggcaagatcggcatgttatatgccccacctttcctgctcatgggcatacgttatatactggcaggtggcttgatggccttgttccttcgtaaacgtcctttgcctactggatggcagtcttggttgaaaataatcctcattggcctgttccaatccgccggagtgatgggctgcgcctactacagcatgaactggattacatccggtgaatccgccattattacgtttaccaatccgctactggtcattatcctcagtgctcttttatatagagtgacctaccgtttcagtcagtggatcggtgttatactcggtttcatcgggattatgttaacttttggatggcagatgagctttagtcctggaacctggattggatttggtggtgcgatctcctttgccgtgtccacattgctcatcaaacgctggggtgatggctacgatacttttgtcttaactgcctatcagatgctcgcgggaggtgctgcgcttcttctactcagcgtatggactgaacagcctcactttatggtcaataccacctcggttttggcgctgctctggttaacgcttgtttgctccatcattcagttctcactctggttttatctgcttcagaatagtgacccagcccaaaccagttcgtatctgtttctggcaccgttctttggtgtattatcgagttggattttactaggagagcacgttcagtggtttgcattggcaggcggtttatttattggtgttggcatattcctagtgaaccgtcgctcatccagaatgagaagtagcgtaacataaacttgaactcccccatcgttcttccttggaagattaatcatttctcgcacaaaagcaaaaaaggcatgcgcttatgggactttcccatgaacgtcatgccttttgttgtataagtaaactctatctaaccaagctctggccaaccctgaatggttacgggttcgccatcgggattatgtgttgcagccgcatagatcggcagtacaccgtcatggaacaaccacaactcgtgcaaggcccgtgtacaaccaacgtacaacagctttgcatcacctgcatttggcaaataatgcttctggtctacgtctgccacaataacggcatcaaactccaaccctttggacaagtagaccggtaaaacggagtgtccacccgtgtactgctttttgccaccatcgatcaggtttagatcccagcctgcgtcctgaagttcacgatgaagttcctctgcttcatgcagtgtacgggtcaggatggagaccgttcggtagtctttgaccgttaacagcttcaaagcctgttccagactcgccgtccgcccttcccctccataagccaaagtccgaaccggatcaccactacggaaaacaggaatcgccgtaattccgctcttgacgccacgttccagaatcgtgtttgcatagtcgataatttccatcgttgaacgataacttcgggtcaatgcaaagtatgcattctgttcctcaggaaatagagaactcatctcttcccacgcatgaacaccacggtactcatgaatcccttgggacaagtcacccagtatggtgaaggaatgccctttgacgaactgatccaataacgccacatgaaatggtgaaaagtcctgcgcttcatcgatcacgacatgatcaaaccgctccgaaccctcgatatcatggaccaatgtatgaatgtataccaatgcaggcagatcctcttcacggacgatatcctgtttcagatctgctgccgtttgtttcattacgcctttggggataagcccgctgagcgaagctggcacagaaccaccctttgcagctttgaacaactgtttatataacgtaagcggctcgtattgaggccattttttggcataagctttctcacgagtagacgcttttttcttgcgttctttacgcacagcttctggcatcggtttcttaagttccatctcaatccagcggtgaacccgcgccatgacccgttctttgcgtttggctagtggataatgcttatattcctcaccgaaccagttctcgatctccgtcttgctgagcaccttaccatcccatggactgaagtccatatccggtacggaatccgcttccatgcccgagagccactctcgaataagctccatgaaacggatggatcctttgtaacgtccaggtacatcatcatttaattcaggccgcgcatctggagtttcgaaccaggtgttcaatgtatccgacgtattcgccaaaggcatttccagccccagcaggttcatcgcccaatccgggaatgtccgctgttgaatgtcccctactccaagttccggaagcacatccgagatgtaatccagaaacatgtggttgggcgcaaaaataaccattttctctgcagatacctgctccttgtactgatatagcaaaaaggcaagccgatgcagggcaaccgtcgttttcccggatccagctacaccctgaatgatcaatgcagtgtttctcgccgcacgaataatcagatcctgctccgcttgaatcgtagatacgatatcacggagtttgttatccttgttctctcccagacgataaacgaggaattcatctgataccgctggctggtcgctgtcacggttatatgtatccgccacacgttccaatatccgctgccgaatgacaacgtttcgtttcagatatacgagaccttcaataagcccttctggggcttcatacgtagcggaggcttcgcctcccgtaaatgagtaaaacaggcttgcgacaggagcacgccagtcgatgacgagcggatgctctcccacctcttcgcggtctacgccgattttgccaatatacagcggtttccgtgcaccactgccctgttcttcgaaatccaagcgtccgaaatagggttgctgcgcgctcttggacaaggcggtgcggcgctcttcgcgtccagcttccagcacttgttctgtgaagtcgtggccggtgtataccggaatgttctgcagtcgttccagctgactatccacttcctccatcgttcgctctaacctgtactcttcttcttgataggcactttgaaagctgtctgacatgtttcagttacctcctaagaatatgttttgctctgcatcgccaatcactgacgacgcaaaaggatacccactatatcatattgatgtgtaaaaagctacagcaacctggtgatctcataaaagaaaaccgttgctcacgctcgtactgaacgaatgaacaacggtcttaagttgaactatatttgaatcttatcttttgaaatagtaatcaatttggttctgatttcaatcttgtccttcctgtgccacaaactgtttctgcgctaattcacggtataccggatgattgctaattaattctgtatgcgttcctgttccggtaacatgtccatgctccaatacaacaatttgatcggaatccaccactgtggacaatcggtgcgcgatcacgatcgtagttcttccttccatcagattggacaatgcttgctgtacttcatactccgaggtgctgtccagactggatgtcgcttcatccaacataagaatatccggactgcgcagtaaggcacgagcaatagcaatccgctgacgttggcccccggataacttgattcccctctcgcccacttccgtgtcatagccctgtggcagcttgtcgataaagtcggcagaataggccatctcagcagctcgccggatctcatccatcgtggcctcacgacctaatccgtacgtgatgttgtctttgatcgtacccgccataagtggactttcctgagatacatacccaatcttgctgcgccaggaggccaaagaataatctgttatggcttgtcccccatatgaaatatggcctgaatcgggcatataaaactgctccatcaaagagaacagtgttgatttgccgctaccgcttggaccgacaatggctgtcactttttgtgtaggtaccgtcaaattgattccgtgcaacacttcctcacctgtaacataggaaaaatgtacatcatggaatgcaatcgtctcatttccttttggcgctaccttagtgctgtcatgtggctcttcctcatcggcaaggatcgcttgtatgcgctccgttgcacctacgactttttgcaaacgagagtataacgttgtgaattgtcccattggcataatgacctggaacaacagcaatatgaacgcaaccagttcaccaggcgacaacagtccagacgctacgcgtattccccccacacccagaataacgactagaacggcagtcatgacaaatgtaaacaaaggaccgatcagagcaagaatgcgcgcttcctgcaagccaaaagcaaacattttacgaatccgggaatctcctgcttccacttcctgtttctccgtgccgtaggctttgaccaagcgaatctcgccaataacctgactgagcacggacgtaagacctgccatctcatcctgctgtttcttggagatcttgtacattttcttcccgaccggcaacagaatcagcaacgtaagtggcaccagactcagaataatgagcgacatcacccaatccaagtaaaaaagtaatgccacgccacccacaacagcgacgatgttggatacaaaggaaaccagataatccgcgatcaacgtcatgatctggcttgtatcattcgtaatccggctcatcgtatcgcctgtacgattccgatcgaaatatggcattcgcagcgacaataccttgttccacagcttggtgcgaagtgttgcgaccacgcgttgtccggcgtaatttaacatataaatgctaatacccgaggcaatcgcctgaatcacaaatgccccaagcaataacaaaataacagatttgttcaatgccgaagtcgttaatccatcaatcagacctttggtcatcaagggcacgatcagtccggctgttgtttgaatcagggttaagatgagggccagaatcaggatcagttttggcgggttcgtggaagcgataagcttgacgaaatccttaaatcccttttttcctaccttcggttcattctgccctgtttgttgctgctcttccattcccgttcctcccgttctccatctgctcaccagagatcatacgtatgaacttacatgacgttgccttttgttattacaaaactccatgcaacacaaagttggctaaaaagaggatggaaatgccatacatgaccacaggcacctgtttaccttgacctgctgccagcttcgctaatggataggcaataaatccaaacgccataccgtccacgatgctatatgtaaatggaatcatgaccatgatcagaaatgctggaaatgcctctgtgaagtcaccaaaatccatatctttcacaccttgtaccatcaggccaccaataatgatcaaaatgggcgcaattgcactgtccggaatgtaaccgaggagcgggatgaagaaaaaagtagctccgaataacacggctgtaacgagcggagtcaaacctgtgcgaccgcctgccgcaattccggctgtagtctcggctgcagcaaccggaggactacttccgaatatacctgccagcacggtgctaatggatagagcacgcagactacctttgaaccgctctggacgaccaatcatctgtgtctgagccgtaattaatccgatattttcgaacaccacaattagcagtagcaaaaataccgcgatccagaacgcaacatcagccagtttcatcaaagacaattcgccaaataacccaccatattgacgcagcgcatccatcgctgatacggattcacccgggttcactgctccaagtacataggcaaggcctgtcccgaccagaatactgatgagaagccctccctggacattccgtataaataaaatcaaggcaagcaccagcgtaacgcaggcagtaatgacatttggatcattgaagtgcccaatcgcaacaaacgtagtctggtgtgcgatgacaattccacttttttgtaaaccgataaatgtcagaaacaaaccaatcccgaccgtaatcccatgctgcagatttttgggaatcgcttcgctgatcattttgtatagtgacgtaaacgcaacaatagcaaacagtatacctgtaacggttacaacggccagcgcttcttgccagcttaatttcatggaatgtacgagtgtatacgtaaaaaatgcattaatccccattccgggtactacgataatcggtgattttccgccaaatgccatgagcaaacagcctgcaatggacgtcagcagggttccaaccatagctgcctgcaaaggcatcccggcatcggaaagaattgtagcattgaccataacgatatagaccactgcaaaataggaaatggctcccgccacaacttccttcttccactggtctcctgactccatgccaagacgtctggtcatccatccgtgtttcatttcgttctattcccctctctctagccgcaaattcattatgtatgtatcatcatttcgcgcagcagtgaatatcatacacggttttgactttgaagtacatgacgtaactctgacatttatctatgaatacagttcggctatcatagacgattgacgtcccatccgctccggtcttccgaagtatgatcacacaaaaaagcgcagatgccttatcggcatccacgcttcttcagttggcagcaagttactgctgcttgttctctgcaatttctaacaaatccttaatcgcaacactgaccataatcagcccagctaccggaggcacgaatgagttactcgcaggtggctgtttggccttgcgaatttccggagcattctcgggaacgattttctgtgttacgtcctcgcgcggtttcatcggcttttcagtcgagaagaccaccttcacaccttttttaatgccgtctttgcgaagtgtagtccgcacaacacgggcaatcgggtccatggttgttttcgaaatatctgcaacctggaatttcgttggatccattttattcgccgcacccatgctggaaatcatcggaattttacgtttgaggcactctttaatgagatggattttgtagataatcgtgtcggatgcatccagcacataatccagttcatatttgaacaattcttcatacgtttcttccgtgtaaaacatattcaatgcaatcgcatcacattccggattgatcagtttcacacgttccaccatcagatccgcttttttctgccctactgtcgtggtcagagcatgaatctggcggttaatattggtgatgtccacgacgtctttatcaatcaggatgatgcgcccaacgccgctacgggcaagagcttctacagcaattccacctacgccgccaataccgagcacagcgactgtactattcttcaacgtgtccagaccttcaggtccgatcgcaagttctgttcttgaaaattgatggagcattgagaatcgatgcctcctttatttcttttccgctaccggtttacgggctacgcggatgtgaagttgttccaattgagagtcatccacttcggaaggtgcattcatgagcagatccgttgcacttgccgttttcgggaaggcaatcgtttcacgcagattcgtacgacccgccagcaacatcacaagacggtccagaccaaaggcaataccaccatgcggtggagttccatattcgaatgcttccagcaagtagccgaatttctcattcgctacttctggtgagagtccaagggcagcaaacatcttctcttgaacatcacgtttgtagatacgcatcgaaccgccacctacttcataaccattgagaacaaggtcataggcttgagcgcggatagcacccggatcagtgtcgaagagatgtacatcttcatcttttggacgtgtgaacggatggtgttctgctacataacgcttggcatcttcatcatatccgaggagtgggaagtccacaacccaagcaaatttgaatttgctgtcatcgatcagtccgagttgacggccgattttcagacgcagtgcgccaagaacgtcagcaaccacttttttagtgtctgcggagaagagcagcaagtccccatcttcagcaccagtacgttctttgaccgcttcgatttcttcaggcgtgaagaacttcacgattggccctttgaactcgccgtctttcacttgaatccaagccagacctttcgcaccgtaacgtgcagcaaatggtccgagatcatcgatctctttacggctccatgtgccacagcctttggcgttcagcactttcacttctccacctttttcgatgacagaagcaaatactttcacaccactgtttgctacgatatcgttcatttcaaccagttccataccaaagcgcagatctggtttgtctgaaccgtatttacccattgcatctgcatacgtaatccgttggaaaggcagttccagctcaatacctttcgtttcacgcagcaatttggccatcagttcttccatcattggcagcaagtcatcctgttgcaggaaggaagtctcgatgtcgacttgagtgaattctggttgacggtctgcacgcagatcctcatcccggaaacaacgagcgatctgataataacgctcaacgccacccaccatcagcaattgtttgtagatttgcggggattgtggcaaagcgaagaattcaccttcatgcacacggctcggtacgagataatcacgtgcaccttccggggagctcttggtcaggattggtgtttccacttcaacgaactcttctccatccaggtagtcacggaacactttggacgctttggaacgcagtttcagtgtttcgaacatttccggacgacgcagatccaggtaacgatatttcaaacgaagggattcatcaacttcgacaccatcttcaatgaagaatggaggtgtttttgccgcgttcagcacttcgatttctgtaatttgaacttcaatttcgcctgtaggcaggtttttgttaactgtttctgcatcacgtttaacaactttacccgttacagcgataacatactcgctacgtacgcgatctgcgatttgcagagcttcaccggaataagccgggttaaagacaacttgtacaatcccgctgcgatcacgcaggtcgatgaagagtacgccccccaagtcacggcgggtctgaacccaaccgttcaatgttactgtttcaccgatgtgtgcgggtgttaatgcgccgcaatgatgacttcttttcataaccaaactcctcattatgtgaatttccgttctgtatgggcagtcagtgcctgctcttcaacagtccggttacgtgtagaccatgtattcgaaaaggcatgttacctctggctcgccaacttccgcttaattggaaacgtcggtgaacctcagtacttttgccggatcaattgttttacttgaatgttttaagatttaatgtaacgcttcgtgcttatttaccctcgcgtatagccgctaccagatcatccagcttcacggtttgttgttcacctgtatccatcgacttgagggcaatctcaccacgctccagctcgtcatcaccaaggatggcagtatagcgggatttgaaacgatcagctgatttcatctgtgctttcatcttgcggcccagataatcacgttccccagacagtccagactgacgaagtttgaacaacagacggttcacttcacgatcagctgcctctcctagagcaacaaagtatacatccagtggagccaatgtagtaacctcaatattttggtgttccagaatcagttggatacgctccagaccaataccgaagccgatgccaggctgatcaggtccgccgatatctccaaccagaccattgtaccgaccaccgccgccaaccgtatctatcgctccaatcccttgggctttcaattcaaacgcagtcagcgtgtaataatccaagccccgcaccagacgattgttcacagcataatctactccgaaatcatccaggtatgactgcagcttggcaaaatgattcaaagactcttcatccaggctatccagtatggacggcgcccctacgaatttgtcctgatcgactttacagtcgagcacacgcagcggattacgctccatgcgtgactggcagtccttgcacaagctgtctttcatcggtctaaggaatccaagtaacgtctcgcggtattctgcacggctggttgagttaccaacggagttgatctccactttgacatccttcaagccgagttctacgcacaactggtagcccagtgcgattacttcggcatcaatcgccgggtccagcgcaccgatggcttctacgccaaactggtggaactgacgctgacggcctgcctgcggacgctcataccggaacatcggaccgatgtaatagagcttgctcacatccggttcaccgtagattttattctctacatacgcacggacaacacctgctgttccctccggacgaagagtcatgctgcgattgcctttgtcatcaaaggtatacatttctttctcaacgatatcggtagtctctcctacaccgcgtacaaataaagaagtctgttcgaagatcggtgtacgaatctcacggtaattaaaccgtcgacacagatctcgtgctttttcttctacgtactgccatttctcgacaactccaggcagtaagtcctgcgttccagtcggtttttgaaaagccatcttgatccctccagcattgatttttttctctaaaagttaaaaaattctacacgtgatcactgcgcgggcagaacaaccttacaatcgctgttaaccccagattttttgaattaattttataatgtggaaatctggtgataaaggcgaacgcttcgcttttacaggttttttctgccctctccgttttcgtgtatttcttttaaatcaacttatataacaaaaaaatccctcgccctgtcgctgtgtatacagcaaacaaagggacgagagattgtgtaatatacattcacccgtggtaccacccacattccggaaacctgacactttagccgttcaggtgatctctgatgattcaggattgcatacagcaccctgatcaagcagatattccgctctacgtgtaacgcacgtcctgcgcaggccggctattggtcaacagatcatctctgctgtgttcgccgtctgttctcggggaagtcattcgtccgctcatcaagagaatccttacagcctggggattcctctctggtcatgtgggcacggagtacttggtcccgtcatcaaatcagtaatatagttcaaaaatcgacttgtattgactatagtcaacgtattattttctgattgtaatgaaccgcagtgctaaagtcaagggttaacacgaaaagatagctcttaaaattttgctcacacgctgcacgggatgggacctccacaaaaatcacggataatagaagctggattcatcatatgaattccaacttctattcgtttcttattcctctattgtttcagcatccactttaacagatccggcgcgctcgcccataaacgggaatgcataatgacatattcaatcgcttcgtcggagtcgcccattccgacaaagtcagggaggttatgcggcaaccgcttcaaacccaacaggtaatcaggcacatgtttgttcacaccccgcgccacacggtacagcattttgagctgggaggtgattccgtttttcttatactccagaataatcttgtcataggcaaaggccgctgcggcgtcacctcttccatactcctccagcaattgctctgcctgttccaattggttgctgtacaaatacacagcagcgagcaggtaacgtgctccggtattgtcttccgtattaagctctagcatatgctccaggatctgtgctgcttctttggtatctccgccaaaccagcaagattcggcataacttttgcatatccggatatagggacgagtctcatgaagcccccagaagtcccctttattcttctcaaagaacagttcgcccagttcacgttttccagcagcgattccttccttgaggtaagatcgtgcatcatgctcattgtccgattcctcagccaaaatgagatacgcatcagaactgtcaggatacatctccagcgctgtttccgccagctgtactttccgtttggaagaactggcttccctcgccttatccagcagagcctgtgctttgtcttttgatgtgcctggaccgttcagcatcaatagctcgtccgtttcaccgcccatgccgtattcttcgatgtaactattcatctccttaaccttccgggagatcgtgcctgtcgttacctcatatttatcagccagctcagcctttgagacattaaatccgtattcctcggacagcaaatactcaattgctgcagagaacgagcctgtcttcttcacagtagggcgggtctgacgagagtagccgttccatagcaccagagcttccaaaattacctctggctcgtattggttcctcatgttctcaatagtctgcagggccagctgttcgtgagccggatgctcccatttcaaatcgcttgccatcatctttttcagcttggtcaaggtcagtttgctctcaggctgaatggaggcttcccgaaccggttgctccgttgatattatccccagtatggattctactgcagaggactccttgttcagacaacatttcttatattttttcccactaccgcatgggcatagatcatttcttccaaccttactcaaaactaattcccccttaaatctgtctctagccattcgcatgagaactctgttgctttagcattgtaggtgtcatttctctaaacgaggcattctatataactttcaaattccatcgatcaagcagaaacggctgccccgtacttatataaaaaaggcggggccgtttcagcgagtatatgttcatctggaatatgacggatcactctggcgatgagttcctcatactctctgtcataggattggattcgcctgaacccaatcgctggagctagatttaccgtcctatgtagcccaactatgaaaacaattcgctgtagaatatataaacccatctctctattctagcaaaaattgaataaaggggtaagctctgcccaaaacatacacattctcagctcaaaaaaaatagcctgcacacggtgtgcaggctcaaaggatatataaaaaaagggggtcatgtgtgttattataagcccactatgttaaaggcttatgtatctaatattacagtaatattacaaaaatgatagcgctttataaattagttttttaatatcctcctgattaaaaaaaccttgcacattactcgactctgtagtcaagcagtgcaagggccaaacagtatctacacgttagttcaactcttccacataggcatggttggaacgaagcttatgaacaatctcgtcataatcctcatcccttactttggcagacagaacataatgcagatcatcataatcggccgaagacacatccgcagcactcagcatgtctccatcctcattcactctgtcacgagtatcccgttctgcatcacggtccacattggctaccacagggatcacattttcgctggctggaacacccggggctgcacctacacccattgctccgttggtacctacgccacctgctgtattataaggcaccagtggcaccataacacgcgtgtctctacctatcgcactatcaagctgacctacttccaaatgctctgtacggaacgtctgaagtgaagttcttgctccctctgcctcgtcttcggttcgaaaatacgcctgaatatgttttgtcatgtcaaaccctcctttttcggaatgaaatgcaacgtgaagtttcgtaaccccacgatgtaacgtagttaagatacatcaatatatgtcagttgcactagctgaagttatataacttttagcagttcacgtacaaacgctggctcatcttcaggcgtacgggatgtaatatagtttccatccacaacggcctcatgatccttgaactctgctcctgcgtttaccatgtcatccttaagtggtggataggatgtaatggtgcggcctttcaacagaccggcactagccaaaatttgcggaccatgacagatcgcagcaattggtttcttcgcactgttaatctcggtgacaaacttcaagatgtgcgcatcagttcgcaaattctcaggggatgatccaccaggaatcacgactgcatcataatctgaagcggatgcatcaccaatcgccttatctgtggtataggaggcctttcctcctttacctttaagggtctcaccggcatttaatccgataatctccacttcatgtccagctttctttacttcgtcatacgggacctgcatctccgaatcttcaaagtcattcgccaataaaaaagcaactttactcataacgtatgttctcctttccgtgttcgaactttctttataaaatcgggtcttgcagtacattggcacttcgttgtgcctcgttttgttattaccctcaccagagcaatttataacaattcaatgtaatttcattttataaagcagtcgtcaaacgaataattaaaaaagatctactcacgacaaaaagtcctgattcggtaaggaatcaggactttttcagaatctgtataatccaaatatcggataattatatacctgtgtaaacattcaagatcgcggaagatgactctgcttccctttgtccgaatcctgaagggcccagatcgttgcaacatattcagcagccgaacgggcaaggtgcaatgattcatacaggttgccagggagtaacaaaggttctgaacgggtacgtgtttctttcgcagattggcgcataattggatggatactcctttgatcatgaaatagtcatcaacgaattatcccttattatggcctgaacccaatgaaattatgcacgtggttcctgacgaaccggactttcaagcatcaaagtcacgggtccccagttggtaaatgttacatccatcatcgctccgaaacgcccggtttcaacctgaatacctttatcccgtagtagttgattaaacgtttcatataacagttccgccgcttcaggtcgggccgcagccgcaaagctcggacgctttcctttgcgacaatctccgtacagggtgaactgggaaacagacaatacagcaccgcctacatcaagcaggctgagattcatcttctcctgatcatcctcaaatatccgcaacccactaactttgtcagccagatactgagcatccttctcggtgtcctcatgggtaatgcctacgagcagcattaatccggattcgatcttaccggtaagctcgtctcccacggtcacctgagcctctttacagcgttgtacaagcaccctcatcttacaggctccttactgcataatccgatgcaccgaatagacatctttcacacgtttgatccgttcaacaacggattgcagatgatccgtattacgaatcagaattgtgacgtgcaccaatgctaatttatttttatctgtccgtcctgtaacggcagatatattggttttactttcggatacagcctgaagtacctcgttgagcaagccatttcgatcatggcctgtaatctctatatccacactgtaactcgcttcgatattctcttcccactcgacctcaataacacgtgctgcttcttctccgtctgcacttgtcgggatatttggacagtcactacggtgtacggaaacaccgcgtccgcgtgtaacgtatccgataatgtcatccccaggtacaggattacagcatcgtgcgaatcgaacaagcagattatcgatgcctttgacacgaataccgttggttggtcgatttctgcgctcgggcgcaggcttcagctcgcgcatctcggaatttaattccagcaaactggactcttcctgctctttacgcagtttttcggttgctttggttacaatctgtgcagcagtaatcccaccgaatccaacagccgcaagcatgtcatcaatatcattaaacgcatattttttggcagcttccatcaacttgtcatccgtcatccacgcagaaggatcaagccccatacgtttcagttcacgctcacagctttcccgacctttttcaacgttttcttcacggcgttccttcttgaaccattgcttgatcttcgctcgtgcatgagaagatttcgcaattttcatccagtcctggctcggtccgtaagaatgtttggacgtcaaaatttcaatgatatcacctgtcttcagatgataatcgagcggaacaatccgaccgtttactttggcaccaatggtccgattaccaacctccgtatggattcgataagcaaaatccaaaggaacagagccgattggcaattcgatgacttctccttttggcgtaaatacaaataccagatccgagaagaaatccattttgagtgactctacgaattctgatgcatcctgtgcttcgttttgaagttcaagaatttcacggaagaacgtaatcttatcttcaaaatgatttccgttcgcagcgccttctttgtaggcccagtgggcagcaataccaaattcagcagtccggtgcatatcccatgtccggatctgtacttccgttggttcgccattgggaccaactaccgttgtatgcagcgattgatacatattcgccttcggcatcgcaatgtagtctttaaagcgcccaggcatcggtttccatagcgtgtgtataattcccagggtagcataacaatccttgatattatccacaataatacggatggcaagcagatcataaatttcgttaaactgcttgtttttggtggtcattttcttgaacacgctgtagatatgtttcgggcggcctgaaaggtctgcctgaattcccatctcatcgagcttgttcgtaattccatccataaccgtatcaatatattgctcccgttccgcacgttttttgtgcatcaggtttgcaattcggtaatactgctgcggattcaaataacggagggcgatgtcctccatttcccatttgattgcagagatacccaaacggtttgcaatcggacagaaaatttccagcgtctcatatgaaatccggcgctggctttcttccgactgaaatttgagtgtccgcatattatgcagacggtcagccaatttaatcacgatgacacggatgtcctgcgccatggcgatgaacattttacggtagttctcgttctgctgttcttccttggagcgaaactgaatacgttccagcttcgtcaagccgtcaacaagcatggcacacgtattgccgaaatgattgcggatctcttcaagtgagaccgtagtatcctctactacatcatgaagaagcgctgctattatggagatggtgtccatctgcatattcacaacaatgtcggcaaccgcaagcggatgcagaatatacggttctcccgattttcgcgtctgtccatggtgggcctgatcagcaaattcgtaagcttctcgtatgcgcaccagatcgggttctttgatatatgccccggccttctcgagtaattgctctatgcccattctgatctgttccgtgtcctttctataccaaatggaacccgtgacagtgctgcaacacaggttccccgtaaaagtaatttcctataattatgacgcttcgcccgtttcccgtcaactgctgacgaataagagcgcttatccaatttttatattgatgatttgaattacttctaacccgtttccctatgacccacaggggattggatgtatttcttattttcttatgtattattgccgttatttgctgaaatagaaggaaaattcatgaaaatattaattccatcgctctgctacgtcaaaaatgttattgattaattaagagaaactctgtaatctattgaaagtttgtgtttcggaaaaggagatgaaattcattgcaacgcgaaattcaggttaatcaaaagatgccacttggctcaggttcactgcttagccttcagcatttgttcgccatgtttggcagtacggtgcttgtaccaaacctgttcggtgttgatccaagtatgatcctgctgatgaacgggattggaacactgttgtacatactgatgtgtaaaggaaagatccccgcataccttgggtccagttttgcctttattgctcctgtcacttcagtattgaaaacacatccagagaacggttattccatggcacttggagcttttattataactggacttgttttctgtttcgtggccctcattattaaatttgcgggtaccggatggattaacgtagtcttcccaccagcggttatgggcgccatcgttgctctgatcggtctggagcttgtacctgttgcagctggtatggcaggattgattaactctgatcctgttgctaacccgaactgggtgccgcaggccaaacccattattttatccatggctacgcttggtatcactgtcattggggccgtaacgttccgtggattccccaaaatcattcatattctaatcggtattgtagtcggttatatccttggctattctatgggtctggttgataaacaggctattggaaacgctgatttcatctcactaccaaccgtaacaacgcctacatttgactggtccgttattttcaccattttacctgtagcgcttgtggttatcgttgaacatattggacatttgcttgtaacgagcagcattgtaggcaaagatctttcgaaagaccctgggcttcatcgttccctgcttggtaacggcgtatccaccattctttccgggtttgtaggatctactcccaatacaacctatggtgagaacatcggtgttatggcactgactcgcgtttactccacatatgtcattggtggtgcagcggttattgcaatcgtactctccttctcaggaacattctcggcgcttgtagccaatattcctgtgcccgttatgggtggcgtatccctgcttctattcggggttattgcagcatctggtctgcgtattctggttgaacagaaagtcgattttgccaaaccgaccaatctgctgcttactacacttgtattggtcatcggactgagtggtacagaagttaccttctacggcgttcatctgaaagggatggcattggcaaccatcgtcggaatcctgatgagcttgttgttcaaactgtttgaagtgttgggttggttgaatgatgattcgcgtaaacagcctatcactgaaaaaacgcccgattaatttcaccgtaccgtatataaatcaaaaaaagcctgttctatccagccttaacggctggatagaacaggcttttttataatcattaatgctgtatattatttcccgggaaaagggaaaatcaattcacgtttttaatatcaacattacaagtggagattttaaacttagtagttcatcaatgtgaatacatcgattttctcaggcaatttagcacgaccattcagatcagacagctcgatcaggaatgcagcaccaacaacgttcccacctaattgttcaatcaggttgatggaagttgcaatcgttccacccgttgcgagcagatcatctgcgatcaggacattttgacctttttcaatcgcatctgtgtgcatcgcgagtgtatccttgccatactcgagatcataaccaacttcaatcgtctctccaggcagttttccacttttgcgaatcggagcaaaaccgacaccaagagcgtatgccagaggggcgcccacaacgaaaccacgtgcttcaggtccagcaataacgtcaattttgagatcagaaaccatcactttcagttcattgatcgcattgcggtacatttctccatccttcaacaatgttgtaatgtccttaaagctgattcccggttgtggaaagtcagggatgacacgaatataatctttaaaatccaaaataatctcctcctaaaataaatacacaaacttccatctaagatacgcccttcatccgggatatcatccattgtgtcagttgcggtgtggctgcatccagcatcacctgttctatctcggccatattttcgagcgcctgatagtgacgtgaagcggttagctcacgcttaggcgggttatccacaaacgcaattttgccgttatcacgggtaatgaaggataactcttcgaatacatccaacatcatcgtaatcatgcgcggcgaacaaccacactgacgactgagcacaggagtaatctcttgttcctccacgggttcagctttccatttcaacacctgcatataaatacgcttaaagagttctctggaaggcatctgaaggcgatctcggcggttgcctgatccgtgcagaaggatgatattctcagctccactgaacaaagccagcatggcattaagttgttccggggtttccggcgtatcaaacacaaataacgtccggacttgttcctgtccataatgctgtgcagcagcattacacggaaataacccgacctttctatcatatacccaaaggcaaggttcatacaatgaatttccctcggaaacatctgtttctttccgaacaatagcaccaacagaaccagatttatatcgcagatgcacctcaagtgagctcaagaaatgtttcatcgcatttaatggctcggcattaccgcgcaaatcaaacacttggacctgaggaacatgaatgtcctgaagcatcaattgaggttttctcatcccattccattcattgatggacagttctcccatcacatcaataacggaaccagggagaaggaactctgctaacgctcccttgccaaaagcgacggtttccagttgctgaccatcctgttccagaaccagtttcagatggcgtttctctcgtcccatcgttctggtttccttcacagttacacttctcaatacaaaccgtggcgaaggattgctcattccaaaaggctgcaatctgtcgatctcctggatcactttcagcggaacatcactgattctgcattcatcatccgcaagacgttgaggtacaaagtcctcttcagttaatacagatgcagcaaactcattcaaaccagcctcaagttcttccaactgttcccgatgcaaggtcatacctgctgcagcagggtgtcccccgtaatggtccatagtgtgtttattgactgtgagtgcctgatagatatccaagccctcaatggagcgtgcagagcccttgcagacaccgctctctggatcgatcccaaggataagtgtaggtcggtaataacgctccagcaatttggaagccacaataccaaccactccaacgttccagccctcaccagccaatacgattacatctggaacggatcctgaacgaagctgtatcttttgttccaactgtgcagttgcttcttgtaatatgccctctactacttgctgccgctcccgattcaatagatcaagctggcccgcaagcgtatgagcttcatccagattctcggtggtgagaagcgataccgctctcccggcatgatccaaacgtccactggcattaatacgaggtgccatggcaaaggcaatattaattgaagtcacctgactctgatccacaccactaatttccagcaatgcacttacaccgggaagacgtgaaccacgcatcgattctattccataactgacgataacccggttctccccttccaaaggcatcagatcggcaacggtgccgatggcggcaatctccatccattcaccgggcacttccccgattaatgcctgagcgagcttcaaggctactcccgctcctgccaaacctttaaaaggatacgggcatcctggaagtttgggattaataagtgtaaaggcttcgggcaaaatttcaggcggctcatggtgatctgtcacaatgacttcaattcccagcgttgccgcataggcaatctgttcaacagcactgattccggtgtccacggtaataatcaatgaaacgccttgttgatgggcccaatccaacgcatggttgtgcaatccatacccttcattcgagcgatgagggatatatatatcgtacgaagccccaagatgacgcatcaaatggatcatgagcgatgtgctggatacgccatcagcgtcataatccccgtagatcaaaatatgttcttcccgctccaatgccagcttgatacgtggcacagcttcattcatgccgaggagcagatagggatcatgcatctgattaaggtcaggatgcaaaaaacgttcggcctccttctcattgtgcactcctcgactcacaagcaaacgtccaacaaggggtgaaacggaaagcgcctgcgagagtcccgcagccgcctccaaatcgatattcggtgtattccaccggtattgcgaataaagcaatgataacgctcctttcctgatctactggacccgcgcttcactactgaattaatgtcgcttcgtgatcgggcagttcatgattggatttatagggataacctggatcataaggtatcgcttgaatctgtacttctttcacatgactgaaacgggttaacagtagagtcttggcccgattagcaatctcctgtgcttccagtattgagattctcggattcacactaatgaccagctcaatcgtaacgtcatgttcctgttcacgtgcaaccaaatgctcaatggtaatgatgccatatacccgctgtacagtctctttgaaatctgacgcttcttcctgctccagttcctgaacaagtgaaccatataccgtgtccacaatcattcggtaacccttatgaagcacaaaacaggaagcaatcaacgcagccgtggggtctaggtagagcagcatgctcaatcccgtctcttcaccagccatcgatcctataatgccgattaacacggtgagcgaacaatagagcgcacggcgatgttgctgtgcataggccagcgcctgagactggtttcgtttacggaaatatctgtactgaaattgaaaaatcgcttctttcacagccaaagctgcaacagccaccaaaagtaccgacttgccgggtgcttccggttcacttccggagagactacccaatgcggagatggcaagctgtaatccacccatgagaatcagcacagataacaatactgagattccgggtctagcaacacttgaatgttttttaaaccgtcccctgcgagccttgctcttatcgcgtacagacttggagggaaagagaccagccagggcagaaccagcttcagaagcagaatacaagccgtcagcgagcaatgatttgctgtttgccatataaccgactcccgctttgatcaccgcaagtcccatattaccggcaataccgctccatgtggcagcctgagcagatgggatatgttctctggtcatgaatattcccccttaattctgtacataaagttgcaaaaccgcgcctggcagacgcggcttcacaataagatgtttagttagattctttagctactgtttttggcttatccacttgtttacctttgagcatcagccatagtggagcggcgatatagattgaagaatatgcaccgaacagtgttccgataaccattgcaagcgagaacatgcgaatggattctccaccaaatatgaacaaacagattgaagctgcaaacacggtgaatgttgtattcagggaacgtgtcatcgtttgagccaaactgcgattgactacctcgcgtaggtcggctttggttgtctttttggcaaaacgcagattctcacgaatccggtcaaagatgacgatcgtatcgttgatcgagaacccgacaatggtcaatactgcagtaataaaggtcagatcgacttccaaacggaagatggagaacacacttattacaacaaatgcgtcatggaagagtgcaacaaccgcagccaaaccaaagcgccactcaaaccggatcgcaacatagatcatgatcccgatacttgcaatgagtaccgcgtagatcgcgttgcgctccaattctttggccatctctggatcaacggtatttacttcataggaagcagatgcatccagtttggtaaattcctgtttaaatttgctctcttgggtctcatccagttcattggagaaacgaacatttacacggtcagcccccggtgtaatggtaacatcaccctcatcaacaccgatgtccttaacgataggtttaatctgatccgctgtaattgctttggataccgagatatccacattcgatccagcacggaaatcaacggcgtaattcaaacccaaagccagaatgctgatgatccccgtaatcgtcagaataatcgagaaaatataggcaatcttactacctttaacataatcaaaattccaattaaagcgcacgaatttcactctccttcactccgaagtacttaggcttcttcaacacgttaccccgtacaagcagggtcaacaggaagcgggagaagaaaatattcgtgataatactggtgacaatatcaaaaatcagcacgagtgcaaaacctttaaccgcacctgttcccaagaagaacataacagccgcagcaataatggttgtgatgttggagtcaatgatcgtacggaaggaatgtttaccacccgctttaaccgaagacaagatcgacttaccactgcgcatctcttctttaatccgttcgtacgtgatgatattggcatccaccgccatccctatacccaggataaacgccgcaatacctggaagggtaagcacgaattctcctaaatagaagattgcaagtaccagccacgtatgtgtgatcaaggcaaaactcgcgataataccaggaatgcgataaagcccaatcatgaacactagaataataacggaaccaatcaatcccgctttaatggtctgatccagcgaaagcttaccaagtgttgcaccaacactttgtgaatacttctctgtaagtttcagtggcaatgcacccaggttaatggtgtcacgaagctggtttgcttcgtcacgtgtgtaagcacccgaaatctgagcggaaccatctgtcaactgttgtctaacggttggagcagataacagctcatcgtccaaataaatagcgagaggttgtccgatcaaacgtttggtaatctcggaaaatttggctttgtctttcacttgaatgtcaatcatcggttcattcaattgagtgaacacaactttggctgcattctcaacaaattcatttccgcgaagctcaattttggtgtattcgccttccttgtcgttctcagctttactacggaaggtcaaaacagccggctctttcattttggctctaacttcagcctcatccgtaacccctgccaacttcaatcgaatccggttgcttccttcagtggttacctccggttcgcttgttccgagcgcattggcgcggctttcaagacttttggccgtttgcaccaaagatgctttggtgacttgttgacctgcttcgagcggctctgcttcatataagatctcgtagcctccctttaaatcaaggcccaagcgtatatttttgagcagttccgggcttgttcccaccattacccctgtggtgacaagcacgaccagaatgaaactgataattcttttcatgccgttcctagatcccctttcgttctcaatattcctattatagcgatgccgtaaaaagcagtcaattttcaacaaaaaagatccctttcgtctagaaagaggacccccggtatgcagacacggtcataaagttcataaagcttgttgctttcagtgacaaaatgtcgttcaccagctggtgaagcggtggaatgccctgtttttcatatttatgactgacgcaattccagacatctttgctggtgacatattcgtaaccgacaagccttaattcctccgctttgctacggcagagcatctctattgactgttccaactccacatcattcatttcttccaacggggagcctcccttcgtacatccaagcctttatgcggcatcaatattacatgattcgacttcgcctgatcatattccttcttgctgaatatggttctttttgttaatcgtgtccaagttgtcatgagaagataaaggactggcataggatgaagaacaacggctttgtcccgtttatgttgatagcctgtactttcaaccgggaaagaggggtagtcttgaagaaacagacatttatccagggggccatgatcctgctcgcggcaggcataattaatcgaatacttggtttcattccgcgcattgcgctgccacgagtcattggtgcagaaggtgttggcatctaccaattgagctatcccttttttatcgtactggtgacattaattacgggtggtattccgctcgccgtagccaagctcgtagccgaagctgataccggtgccaatcgttattccccccagcgaatcctgcaagtaagtttaagctttacgttgaccctgggtgttgtattcatgtttttgtgcatcctgtttgcaccctgggtaaccaaatacgtgctcacagatgagcgggtgtaccatacgttcgttagtatgagccccatgattgccattatcgccgtatctgctgtctacagagggtatttccaaggtaagcaaaacatgatgcctactgccatttcatccattgttgaaaccatcattcgtatcgtctgtgtcatttggtttgcctggcttctcctcccccacggtattgcccaagctgctgctggtgccatgctgggcgcgctcgttggagaattcggcggtatgcttgtactcttgtggaagtataacaggcagaagaaagagttaccgctcgctaaccaacagcacatgtccaatctcacagccagacctttaaacccaataccttcagttctgaaagaaacgggtactccacagccgggattaatccggcgtttgcttgcaatctctattcctgttacagcaggccgattggttggctccttatcctacttggccgaaaccatcgttactgcccagagtctggctctggcaggcatatccaaagggctcgctacagcacaatatggtgcattacaaggtatgattattcctttgctgctgctgccgggggcactaacctcatcgctcgcgacatcacttgtgccttcactgtccgaagcttctgctcagggagatcgcgctctgattcacaaaagaatgcatcaggccttacgtttggcacttgtgacaggtgctccgttttccgtgtttatgtatgtgcttgccgaaccgatgtgtcttgttctgtataatgatgcatcgatcggaagcatgctgaaactaatggctccctttgctttgttcatttatattcaagctcctcttcaagctgcattacaagctcttgaccgtccgggtaaagcattgctaaatacgtttatcggtgctgttatcaaaatcacgttgattttaacgcttgcttcccggcctgaatatggcatcttcggtgcagtcatcgccatctgtgtgaattctacggtagttaccctgttacatgcccaaagcgtacgcagtctgctacagttccgcttcaaaatgatggattgggtcaagacgggtgcaggaatgtttattatgggagcagcgaccctactcgtatacgaagagactgccatgatattgcctttttgggtgaggatgcttctcgctccttttgtcgggcttatcgtgtatttcatcgtcatgggctggaccaaaatgattgactttcatgatctgtcccgtgctcctttgattggttcatggttcaagcgtcgctcaggcaaatgattttcactttttatcatcttttggactgacatatatcttcccattgtggtcaatggagcatataaatacatctttgaaatccagaattccgttctgttgaatttgatttttcagccaaaatctcgttttctggatgatatccagattctgatcctggacctttccatccatgattaaggggagtggcagaccttcatatttaatatttggaaatttgatatttggagatccgtcaatctggttttttcccgttttgggtttactggaagaagaatcttctgagtcataaccggaagaattgctgtcgttagaagtattctcatccttgggaaacacggtcagcttgcctgtggtctccaaaatagcgaaatcaacctcaccgatactgtctacattctgttcacggagttgttgcaatagatcatccagattatatcgttgcttccgcatctcatcccggtgaagaacgcctttggagatcaaaacggtaggtttgccatcaattatcaggcgaagacgccgacttttaagacctataaaggccattccaatctgtacaatgattaaggtaagcatgggggcaatcccataagagagtggtttatcaatatcttcaatgacaaaagcagccatttcagcaagcatgatggacacgacaagatcaaacatggatagcttaccaatctcacgtttacccataaccctcattgcacagtacaccagaaagtacatgagaatggttcgaaagatatgtgatccgacatctgggaagttcacaacaggggtcctccttcgaaactgagtttttaacagttagctgggtagtgcaatccctattttgacctgaaccttacatgctcatgcagaaataatccgttcatttaatggaaaacagttcataagtccgaaggcttgaccatacactgtattaacttataacttgtacaagggggttgcttcatgcaattgatccgccgcttggtttcgtttcgagtgtccaatccgattctgtcaggcctctgtcaggcttttgtatggatgtttatcggggcatttattctctccttgtttctctggatgagcggaatgcgggaacaggacctctcattgtatacctatgttgttcatggcttgtcattattggttggtggttttgtcgcaggcaaacgttctggtgaaaaaggatggtactacggagggattaccggaatcgtatatggactgcttgtgctgttgatcggatttctcgcgctggatgcttcgtttaattggaaggatagtttacaacttcttagcgcgttcttcatttcagctctcggtggcatgttcggtgttaatacgcatcgctcctaactgactggtaaagaacatcgaccttccctcataaatcaaaaaagagaaccggttctccaaggagatccggttctctactagggaatacgccacaaacgcaccctcgttattctatgttacagtaactattcaacagccgtatcacgagctacagccgtgctgattgcattacggtcaaatgtaagcttagttacatcgtttacacgcaatacaaccacatcgtccgtaatctcagcgatcgtaccgtgaaggccaccaatcgttacaattttatcgccttttttcaattggcttagcatggaattccgttgcttttgctttttgttctgtggacgaatcattaagaagtagaaaatcgcaaccatgagtactaaaggtacaatcaaagatacgatcccaccgccttgcgctcctgctagaggcattccttgaaacattcaaactcccccttatcgactatacatacagatattgcttgttacgccggtttcctcaaaaactcaatcagaaacctttgtcattgtcatgaagaccatattgatcgaaaaattcatcccggaaatcaagcaaacgatcttccataatggctttacgtacattacgcatcaaattctgcaagaaatgaagattatggatcgttgtcaaacgcaggccaaatgtttcatctgctttgatcaaatgacgcagataagctctggaatagttacgacaagtgtagcaatcacattcaggatctaatggtccaaaatcggttgcaaacttggcattacgaactaccagacgtccttgactggtcatcgttgttccgttacgggcaatccgagtaggcagaacacaatcgaacatgtccactccacgaatagatccctcaatcaacgcatcgggcgaacctacccccatcaaataacgtggtttattggacggcaacaaaggtaacgtataatccaatacaccatacatcaaatgtttcggttctccaacactcagtccaccaatagcataccccgggaaatccatggaagtcaaatctgcggcgctttgacggcgaagatcttcatgcatgcctccctgtacgatggcaaacagaccttggtcatgcggacgagcgtgactttcgagacaacgttctgcccagcggcttgttctttcgagtgatttttttacatattcatattcagccggatacggtgggcattcgtcaaacgccatcataatatcggagccaagtgcattctggatttccatcgccacttcaggagaaaggaacttcttgtctccattcagatgagaacggaagttaacgccttcttccgtaatcttgcgcatctcgctgagagaaaacacttggaatccgccgctgtccgtcagaattggacgatcccagttcatgaatttgtgcaacccgccagcttcacggatgatttcatgtcctggtctcagaaacaggtgataggtattactcaaaataatctgagcatccatttctttcaactcttcagggctcattgttttgacagtcgcctgtgtacctacaggcataaaggttggtgtctcaataataccgtgaggtgtatgtacacgtcccagacgtgcaccggattgtttgcaagttttgatatgttcatacgtaattgctgccattggttttaatcatcctctaaaagttaatcgttatactaatatatcaacatggcatcgccgaagctgaagaaccggtatttctcttggatggcttcctcatatgcctgcataatatgttccctgcctgctagtgcactaaccaacataaccaacgtggatttcgggagatgaaaattcgtaagcatcccatcgatcactttgaaggaataccccggatagatgaaaatgctggtccatccgctgctcgcttgcagtattccattttcaaatttgctgcctaccgtttccaaagtccgacagctcgttgtcccaaccgcaaaaacacggtgtccattcgttttagtctggtttatcagatctgccgtttcttgtgacaaggagtaatactcctcatgcataacatgatcttcaacaacgtcaaccgacattggtctgaatgttcccagtcctacatgaagcgtgatgaaggccacattaacatctttggcacgaatctgatccaacaactcatccgtaaaatgtaatcccgctgtaggtgcagccgccgatccttcatgcttggcgtacacggtctgataccgttcgcggtcatccaatgtctccttgatataaggtggcaacggcatctcaccaagacgatccagaatctcttgaaagattccatcatacgtaaacgtaagtgtacgtgcccccatctcgccctcttcttcaatgattgccttcaattcatcaccaaatacgatgaccgaaccggctttcagctttttacccggcttaaccagtgcttcccacttgtcgccttccacatttttgagcaataacacttccgcttttgctccggtatcttcttttgtaccgaacagacgggctggtagaacacgtgtatcattcagaatcaatgtatcaccgggattcagaaaatcgataatatcaggaaacgtttgatgattaatctcaccactatctttgttcaaggtaagcaaacgggatgccgtgcgatcaagtaacggcgtctgtgctatcaattgctctggtaattcaaaatcatataagttcacattcatttagtttcattccttaacaatagtcgcattttgataatagtgtttcaatattgcctggtaatcatacccttcatctgccatgcctttggctccccattgggacaagcccaatccgtggccattgccctgaccgatgaacatgaaggtctgaccctgcgttaccgctctcgcttgaccatcaccactcataaccacaagtgcattaccggatgatgttcctgcgccagaagaagacaatacagcggcaccatttgagccggttttactggctgttttgccgtcagcgcctaatacagtataacttccggtccctgcaatatcaaataaagtactcggtaatccaccgagcgcagagcggtatgtatcggcatatttcaccgtcatagcctgtccattggcagtgacttcaagtactcttccggaaggtccacgcttggtcacttccaaggttgagattgaagcaggagcagacgctgttgttttaccctgaagggatttaaccaactgggcagacgtgaaaggtcctctcacccaagcataatcgttggattgagccacttttgccaacacaacagcttcgttgcctggattcattttggctacaggttcaacggtggattgaactaacggaacggcacgcacattggtattctgagccgttaccgtcacttttgccagtcctgcattggtcttggtcgttaattctttgatgttgtcctcacgaatgtacccgctaacgcctgtacccagtagcacatggtaccacgtatgtaatcctgcctgggctgatgtatctcctgaactaaccacattggtgaacacacctgctccgccgttccatacctcagaaggatgagccgtctggccgccagcattagaggagaatacagcttcgatgattttcccaccgctcttgaccacttctccagcagttgcatccactgcactggttactttatcgttctccgaaccaatcccgttgtaggcttggctgagcgttgtatccacgacattcgcaattttgaaacgttcaccctgttgaagcgcgtaggatcgagcagctacggcttgaactttcagagcttcagcaggccaggaggaatacacctctgcccctacgacagagtacaggtattgctccagtggaacgacgttgaccaacgccagatcaccacttacgatgctgatttccatatctccacgatacgttcgctgggaacgttccactactttgatcccattgccattcccttgtaccaatgctttggattcagtacctgcaatggtgtaatgcggagctgttttgagtgcatccgtacttaatcctgcatcctggcggatgatgagccctgcattagtgttgacaggtgaaaggcttacccccggagctttggcttccacactgttcttcaatgcggttaattccgcatccgttgaagcttcacccacccataccgcgtatgcttggcttccaccactcagttgaaggactggatagacactactaactcctgttgataaaaggatggcttgtgctgcctctgcttcctgaatcgaaccataggttccagcagacaggcgtttacttcccgttacagctggcttttgaccagccaattgagctgctgctaccttttgtactcgtgtaacagcttgtcctgccagtgcctccgttgcatagttgcctgtgtagagctggtaaatggcatttccattcacagacgttgtgaacagcaacggtttatctgcggttgcctgcaacaattttgctgctgcagatgctgccttaaagtccgctgtttccaacacctttactcggaatccatctgcactgaaacggacttgtcctgccggaaggtttacatttgcgccgctctccgattggatgctccattgtcctgtcgattcaagcgtgatgagtggtgtagttgatttatacgtactgcccagattcgcaaacatggctacccggatcgtctgtccatcatttgctgctgcatacgcaggcacttgcaaacaacccactgtcaaaagagctgccgccagtaccttcaatcgacgactccacttcttcgttcgtattgcttttcccacaatcagactcctctccatgcatttctttcattttatatcgggttaacacgtgattatttcaaggtttatggtgaacgttcaaatgagcatgttcaacagattcgattatttcccatctcttggtggaacaggaagacccaaatgatgataggcgagatctgttacgatcctgccccttggtgtacgctgaatcataccaatctgaagcagatacggttcatagacatcctcgatcgtctgactttcttcaccgattgtagcagcaattgtatccaatcctacgggacctccccggaagctgttgatcatagatttgagcatcttatggtcaatgtcatccaggccacgcggatcaatctggagacgttgcagcgcttcttccgccagtgtctgcgttataatcccatcaccacgcacctgtgcaaagtcgcgtactcgttttaacaaacggttcgcgatcctcggtgtcccacgtgagcgcaatgcaatctcttgcgcagcatctcccacaatctccacacccaaaatttcggtagagcgtgagacgatataagccagctcatcaaccgtatagaattccaatcgactgataacaccaaatcgatctcgaagtggagcagacagcaagccagcacgcgttgtagccccaatcagagtgaatggtggcagatccagccgaacggaacgtgcacttggacctttaccaatcataatatccaatgccgaatcttccatagcagggtacatgacttcttcaaccgtacgatgcaaacgatgaatctcatcaataaacaggacatcgccttcctgcagattggttaacaatgctgcaagatcacccgggcgttcaatggcagggcctgacgtagttcgtaaattaacgcccaattcgttggcaataatattggcaagtgttgttttaccaagtccaggtggtccatataacaaaacgtgatccaatgcctcattacgaaatttggcagcttcaatatatatctttaaattttccttcacctgattctgcccgatatattcattcagatacctgggacggagactcaactcaacattttggtcctccatcatcaggttcgcggaaataatccggtcatccatgttcatccctacctttttttgcaggctacagctatattataatatgcaaatttgtattatcccgtaaacagcatttgcagcgcctttttcatcaacacatcaacggaatctgctgtagtaacatcctttttcaatttgagccatactttatcaagctcactgtcagtatacccaagtgccttgagaccttcacgtgcctcatcccaggctgaaccacttcccgactcttccgatggaggagcgaacaaccctgttgcatacgctgccgcgccaaaactatccagcttatccttgagatccagaatcatgcgttgtgcagtcttcttgccgatgcccggcaatttggtcaagaacgtaagattctcctgataaatcgccgtaaccacatgttctggtgtacctccagcgagtatgcccagagctacttttggaccgataccggatacttcaatcagtttacggaacaaacgttgctcatcccgtgtaacaaatccaaacagcaacatcgcatcctcacgcacatgatggtgagtgtacacggtaatttcgccttcttgcttcgcaaacgcaaatggatttggacagaatacgcgataacctacaccatgaacatccagcacaatataatcattctctacatgaatgaactgtcctcttagaaaatcaatcattttcgcaatacctcattcaacttggaatttaatgtataagagtgtgcgtggcacacggctacagccaatgcatccgctacgtcatccggcttaggaacgacctgaagacgcaagaacattttgaccatttcctgtacttgcttcttctctgctttaccgtaccccacaacagcctgcttgatctgcattggcgtatactctgcaataggcagacccttctgtgcggcagcgagtaccataactcctctagcctgactcacagacatcgctgttgtaacgttccgattgaaaaaaagtttctccagcgctactgcgtccggtttgtatttatcaatcaattgcaccataccttcatatacgtgaagcaaccgttcctcttcaggggtatgagcttccgtctgaatacatccatattgtacgggtaccaccttactgccgattttatccacaaaaccaaaaccaacaatcgcaatccccgggtcaattcccaaaaaacgcaaaaccatctctccctcacaaaagcgaacatatgtatcgttcatttcattataacaaaagatagaccctgcggcaggaaaaactttgtctaactgattactcgtctttattcgtgaattttttacatgtttatacgtattttcatgtatttcagttcaaacgacaaaaaggacatctcttcgatgtccttcaccacattccacgtatcgtattttagattctatcgcttggttacgtaaaccaacaatgttattgctattgccaccatcgtttcagtacttcacaattttaataccgtaggtgaggacgtttggattacccgccattacggattaaatgatggtcttcatccacggcatagtcactgaacgtagagatcacgctatcatactcatccttgtcttgaatccgaataccctgttgcaattgctctagtacgccttcaggcaaagaactttccaacgttccaacatccaattgaaagaacgtacgaataaccttctcttctgcaggcttaccctcgtacaaattaaggttccctacagcatctatactgatataagcctgttgtttacaaagcggtgaaaggtcatctacacgttgcttcaaatgcaactcatctgatgttccaacggtagcatcccattccggatgttgagctagcagcatcttcaactgtggtctagccatcttgcctaactgctctgtttccactccgcagatgtactgtgtctccaaaaccacacttgttaaatgatccggatcagaatcaagttgctctactaacgcctgaatctcctgttcagatcttgcttcctgcgtaacagggcccatcacactcgttgcctcactaaaattagttgtcagcaaacgctctatcgccgatgagatagacaacccgctgtaagccaatatcgtaactgcaagcagagccgccgtcatccatactgttcgtttccaccttcgccagcgtctcttgaattgttttctgaagttaaacgtgttcacatgaaccccttctatcactttttaaacctattgtgacctaaagattgaggctttatgcacaattaacttgtagtctgaagaaggaacacacatgtgttagcttagagaatttgtcatagttaatatcgaacctgcatttatagaatcttatatagataaatataaaaaaacactatctaattatagatagtgtttttagagatcgggatgacacgatttgaacatgcgaccccctggtcccaaaccaggtgctctaccaagctgagctacatcccgttatatataccggcgagaggactcgaacctccacggtttcccactcgattttgagtcgagcgcgtctgccattccgccacgccggcaaatttgaagtt

SEQ ID NO: 6 - DNA, 337671 bp, Paenibacillus xylanexedens
  source 1..337671: mol_type = genomic DNA
gttcagttttcaaagatcaaacttgtttcattacctcttatgtttcccgtgtcagcactgtgtttcagcggcgacttaaataatatatcatacggctgaatgtaatgcaacagtttttttcatttcttttctttagtagttttacattagctagagctatcatatccgtaccctatcttgtcctatcatattaggtcatgctcataaggtacaaatattttaacacattcatgaaagggtttacaataacttcttaataaaatgctttctattatttcctgagcaactatatctccgttatgtgcaactcaatgtttactcaggtaagcgggaagccagctctctattacagagctggcttcccgcttatataacaggtccctcacttattcatcaatcacaatcctcaggttagttttgtatccatggattacgacgctttttatcggatttccgttggctggaagtagctgcaccctctctggatcttttcccggacacggataccttggatttattcttcagaggagccttgcttgttctgcgttttgcagcggccggcttattccctgcttgcttagacttcccttccgaatctgatccaacctcttcaattgctacctgacttaagttagcgtcttcacgccccccttttttggcacccttcccttgcccctgaggaggatacatttcaccaaatgctccaagcggggacgggggtaccatgttctgagtagggtacggattctgataagcatactcaataggctggtttggcatcgttgatgtggacatttcaggcggcataccgtacgaaggaccatacatattccaagccggatcctgataaccatgagaaggataagtatactgaggcatatgtgtatgtgagccacatccgcatggagggtacggaagcattgagtatggagatatgaaaggcggctgatgattcatatgactaggtgctacatacgttgggaatggactattcacttcgccagctggagcaatcggaaatgagttgttttgcatgtctgcggacagattcggcataacgttattgtggttataaccctgctccgcgccagtccacggactgttaggcagatcactgccactataaggactaacttccggaattcctggaaacgatgcattgttactcgctccagccgtgtacatgtcttgctgagcaccatacacctcttgtacaggaaccgggatttgaacataagggtgctcggcaggcgcatgatgcaacttattaccacaaccacaaggctttttcgttgctggtgcaacctcagttggagactttgtattaggcattacaggcaaaggcataatttcaggcgatagattaggcattgtgtatttcttggattctgctaccggttttacataaacttcgggtttaacctcttcttttttgtgcgtttccttttcgggtttcacttcaggaagctccggtaactgcggcagtacctccagttcaggcttcacattcggcttctccgtattggctggtggtggagcaggcaccggaaccggaacctctgctaccggagcagggggagttggcgctactggagccggtggttccggttctttgactcccgtgtattccttaccttcaggtgacaacttttcatgagcagcaatattactggcacccgaattagatgtggtgtttccttgtgcgtgcatagatggaatataaactgtctcccccaccagcagagcgttcggatttttcaactgtggattggcattgaccatgtcttttaaaggaactccccaggcttgtgccaacttccataacgaatctccttgttgcaccttgtgactgtggagcacaccctccggtttcggtgttactggctctgcagggattttgaccttcatgccaatatccagcttgtcgggatttgtgatttgcggattagccgcgatcaatttgtccagcgctacattgtatttttgggacagcagatataatgtgtcgccttttttcaccatgtgtattttcacagggaactaacctcctagacgtcatacttgggcagtacattcgcccataccgttactacatcctatgcagaaaccgggctaatgacatcaactaaacaaaaaaaatcctcctgtctctaaaatccccatacaccaggtatgcagaattttatcggacaaggaggattcctgttccctatgttatgcaattctaacttaagattcccacactttatatccatctttgtcaacaatctgacggaatgcttccagcagtctcagcgttaccggacctgctactcccgtgccgattgttcttccatcgacttcatatgcagcgataacttctgcagctgtcccggtgaaaaagacttcgtctgcgatatacacatcatgcagggtgaatggcacttcttttaattcaagctccagttcgccacatagatcgataatcgcttgacgtgtaatcccttcaagtgctccgagataacaaggcggcgtgtacactacaccatttttgatgatgaagatgttatcacttgaaccctcagtaacgtaaccttgggagttcagcataattgcttcaccagcacctgaatagttagactggattttaaccaggatgttattcagatagttcaatgatttaatttttggattcaatgcgtccggaatgttccggcgttgggatacagacactgctttcaatccagtaagatacgcttcctccggatagatcgccaattgctccacgatgatgattacggatgccttagggcaacgtaacgggtccaaccccagattaccagggccacgcgatacaataagacgaatataaccattacgcatatcattgcggcgcaccgtttcagccatgacttccagcatctcatcaatggacagcggaatgttcaaactaatggattttgccgaatcatacaaacgatccaagtgggccttacatctgaaaatatttccgttatagatccgaataccttcgaaaatcccatctccatacaaaaatccatgatcatataccgaaacggttgcgttctctttggtcacatactgaccatccaaatagatccattgttctgccactgatgactgcacctccataaaatatccattccctgtactccgaaacgttattaacccgtccattgtacaccaaatgacatgccattactcgctcattctaccccgacttatgacaaccttctaacattcccaaacaccatcaggtcaatcatctcgaaggatatgtataacaaggatagctacccagaacacgcacctgacaattcaatgcttcaatctccgccatggctgcggtaagcaataccgaatcgaccgtttccacaacatcaatgtagaaatagtaactgcccaatcgtttcttcgttggacgagattcgagacgggtcaagttcagcttcctccatgcaaaagctgacaatacctgatgcaacgcacccggtgcatcttctggcaacgtcaccagcaagctggtttttacatgatccggttcacgtggaatgttcacaggttcatggccaatgagcacaaaacgggtgtagttgttgtcatgatctgtaacccgttcagccataatgtccaagccatgcttctgagcagcaagtttggtaccaatcgctacccagcccttacctggattttttttcacaatttctacagcttcggctgtactgttcacaccttcaaggtcggccccaggcgaatgtagccgaataaaattctgacactgcggaatagccacagggtgagacataatcttggtgattctaccaaagtcatactcgccgctctccgtcttaaattccgagccatgtccaatgacattctggatggatgggtatacccactccgcttgcattggaatgtcgacttcattcacaagccagtccatatgcagactaacggagccttcaatggtattttcaatcggaatgacactgtattgtgcagtcccgctatccgttgctctaaacacatccgaaatcagcttggagtgaagcaaatctaacggttcaccgttaaaaaggaaatcaattgcttcatgggaaactgagccttcaggtaatactgcaattcgtttcatgcattaacttcccctttgattctgtccagaaaaggacgttcgtcttgatcaggcagcacggttacaccgtccaaatccggatcgagccacagtgcagaagcagatataccctcccgctccatcgtgtccagcaaatattgttccaatcccgctttccgggtgtcatgacgatctaccaaagtcaatacggttggtccggctccgctcagggcagctcccaacgctccatgatcaacagcatgttctaatatctcagccatgcctggcaccaatgatgcccgatatggttggtgaattcgatctgacatcgccttctgaatcatatccagtcgtccactcgccaaagcggcaacgagcagtgaggatctgctaatgttatgcaccacatcagacatgccaaattgctctggaattacattccttgcttttgaagtagacagctggaattcaggtacaataaccaaagcctgcaaatcctggtgtggttcaatacgtatatgatctacctgttgaccattccatgcagccgtaataataccgccatacagagatgctcccacattatcaggatgcttctcgagggatgtggccatatccagaagcttcgcatcggataaaggagcaccaattaatgcattcgctgctgccaatgcaccaacgatggctgatgcactgctcccgagtccccgcgtaagcggaatatcggaatacatggaaatctccaattcagggatggataccccagcttcattgaataccatctgtgccacttcgtaaatcaaattcgatttatctgttggcagacctgtcaaatgattgccgtgaagatgaaatgacgtctgctcggcaggtttcatttccaaccaggcatacaaagacaatgccatgcccagggtatcaaaccccggaccgagattggctgtgcttgcaggtatttttacggttaccttttcacgcaaactcatacagattgctgctccagttgtgcaatagccgccattactgcttcttccgtatcttcaacaacaagtggctcagtcgctactgttttgatcgcaatattaggatctttcaggccattacctgtcagtacacaaactacagtctctccgcctttaaagtacccttcactcttcagtttgtatacaccggcaagggaagccgcagaagcaggttcagcaaaaatcccttcccgagaagcaagtgtacgatacgctgtcaggatttgttcatccgttacatagttgatctgtccaccagattcctcagccgcagctactgccgttttccagctcgccggattaccgattcgaattgctgttgctaccgtttcaggttcaaggatcggctcacctttgactatggccatcgcaccttctgcttcgaaaccaaccatacgtggaagcgtgttggatttgcctgcctctttatattctttgaaacctttccaataagccgagatattacccgcattaccgactggaatagccagaacgtcaggcgcttcgccaagttgttcaattacttcaaacgctgctgtcttctgtccttcaatccggaacggattcacagagtttacaagcgtgatcggatgtttggctgtgatctcacgcacaatctccagtgcacggtcaaagttaccattgatcgcgatcaccttagctccatagatcatggcttgggccagtttacccagtgcaatgttgttattcgggatcagtacgatacaattgaggccaccacgtgcggcgtaggccgctgcagctgctgacgtattacctgtggatgcacacatgatcgtacggctaccctcttccatagctttggcaactgccataaccataccgcggtctttgaaagatcccgtagggttcaaaccttcgtatttgaagtaaacattcaaaccgagttcctcagacagattctctgcatgaatcaacggtgtgtttccttcctgaagcgtaagcaggggtgtattttcattaactggaaggtgctctctgtacgtttgcaaaagtccttgatatctcattgtgggtaaactcctttatgttttaataatctggaatgatgacctcttgaaccggatatgattaacttgtacgttataactgaaataattgagatgccgtatgggataaggacaattatccttcgacccggtagacactcttaatgcggcgaatgacgctgagtgattcaaaatgttttaacactttatccatgcttgccttacttgcgttatgtgtaacgataatgatctcggcatccgggttgtgctcatttggctgttgaacaaccgacgccagactgacatcatattctgcaaaaatttgtgtgatttgtgccaatacaccggctttgtcgtctacatgtagtaaaataaagtttttcgacacgatctgctcgtcgctttgtagtcgcttaatcttataaggaacaattgctttgagaccgttcacgccaagtttaaggtttttggtaaccgccacaatgtcagctacaaccgaagttgccgttgggagttctcccgcacccgcaccgtagaacatcgtctcccctacagcttcaccgtgtacatatactgcgttgaacacaccgttgactgaagcaatcgggtgattctgtctaaccattgtcggctgaacgctgatcgtgatctcatcgccaatacggtccgcaataccaagtaacttcatctcatagcccagtcttttagcatacataatgtcttcacgagttacggaggatattcctttaacggttacatccttcaactccacattggtacggaaaccgagtgtactcaagatcgccattttgcgagctgcgtcaagtccctccacatcggaagttggatccgattcggcatatcccagagcctgtgcttcagccagtacttcttcataggatgcaccttcctgactcattttggtcagaataaagttcgttgttccgttcacaatccccataatgcgggtaatccgatcagaagagaaaccttcaatcagcgtacgaatgatcggaatccctccagcaacactcgcctcatagaacacgtcacattgtttttcctgtgccttcgccaaaatctctgtaccatgcagtgccatgagatctttgtttgctgttacgatatgtttcccacgttccaatgcttcaagaatatactccttcgtctgatcaatgccgcccatgacttcaacgatgacatcaatatccggatgacgaatgacttcccaaggatcttccgtaagcttggcacggtctacagcaataacacgttctttctctgtgtttttcactgcgatcttctcgatgacaatcggcgatccaacctgactgctcagatcctcctgattcccttccacaatgcgaacgactcccgttccgacagttcccagacccaacaatccgacttttaccggtttcactaacgatctaccccctaatgtctattcttgtccgtcagtcctgtatgttaaagcctacttacccttggcctacaatacgtgtacgtcttacgccaggcatatcttgcattcgatccagcatttcaccaatttcgccatgaagatgtgttgtttccaccgaaatgacaacattggctcttccttgaagcgggatactctgattaatcgtgagtacattagctccataaccagctacatgtccaagcacacgagacaagatacccgactgatgctccagatcaatggagatcgttacaattctctcgcgctcaagctggttgatcagatgaattccatctttgtacttgtaaaaggcactccggcttaatccgacctgttcaaccgcctcatgcactgttttaacatcaccagaagccagtagttcttttacctgcatggtcttcaccactgcctctggtaaaatatcttcccgtactaagtaatagcgttcgttcacagaacgtcctctcctcaaagactcatgtattcatatagtggacattatataggatctatgacaaaagggcaatacatgacacgcctattttttgaaatacgttcctcacagtatacaagtttatccctctcccatgtcagggaaaaacaaaaaaaacgcagagttgcgggtcaacttcccacttctctgcgttcctatatcaatctgtctctccacggaagacggctacttagtagtaactgctaccttccacgaattcgaattcaaagtctccaatacgaacgatggtgccttctacagctccgcgcttacgcaactcagcatccacacccatataacgcagtgtacgtgcgagtttcagtatagcctcgtgcgagttcagttgcatccgtttcatcatgcggtcaatcttggcactttcgacaacgaacatttcattctcacgcacaattttgaaaccatcgtcttcttttttgtccagactatatactttacgttcagatacatctgctacctcttcaaccactcgctcgtctggagcctgatccagcagatcagctgcacgatacagaagttcttgaatccctttacgagtcaaggatgaaattggcatcacttcaatatcaggttgaacttcacgaacttgctgtaaaaattgctccaggttcgcttcagagtctggcatatccatcttgttagctgctacaacttgcgttctctcggcgagaagcggattgtacaacttcaattcgtcattgattttctgccagtcttcaaaaggatcgcgtccttccgaacccgacatatctacgacatgaacaataatccgagtacgctcgacatgacgcaggaactcatgtcccagtccgacaccttcatgcgcaccttcaatcagtccaggcagatcagccatgacaaagcttcggccttctcctacaccgactacacccagattcggtgtaatggttgtgaaatggtatgccccgatctttggcttggctgacgaaacgacagaaagcaatgtagatttcccgacactcgggaaaccaaccagaccaacatctgccataactttcagttcgagtacgatgtaacgctcttgtccttcttcaccattctcggcaagttcaggtgcaggattgttcggtgtagcaaatcggatgttacctcgtccgccccgaccaccacgagcaataacaacctgttgaccgtgacgtgtcatatccgccaatacttctccactgtcttcatccaagataatagttcctggtggaatgcgcacaatcatgttctccgcgtttgcaccatgctgacttttgttacgtcccttctcaccacgtggggccttgaagtgacgctggtaacgaaaatccatcaacgtacgcaaaccttcatccacgcggaaaatgatgtcagctcctctgcctccatcgcccccggcaggtccgccgtttggtacatacttctcacgacggaacgaaataattccgtcccctccgtctccggcttttacataaatcttcgctttatctacaaacattggttaaccccttcttcctatattccacacggcattctgaattgtataaacgtatcctcagacggaaactgctccgttctgactttttttcctttgagtacggcagtaagctgccgcagtgtttccggatcgggtgtttgatccccatccagtcggacaaccacatctccatgatcctgtccgaagtttaaggtcagtttgcgaacctctccccaagaagaccggccgccgccatattgataggccctgattgcatccgcaatcgccccggtaagtgactcgccatcctcgggagagaccagagcactaagctgcaactcatcttctatttccacatgcaattccagcgcaattccactggcgcgaaaagactgaagataaaatacgagggaaggaatacctaatctagagattcggctttcttctgtaacccgctcttttattctttccacacattgcaaggatttatcaagtttgcccagccgaagatatccatataacacctgaaggtcgttcatccagtcgtgtcgatgatgatttaatgaagcaattgctgttttttccatagattgtatgatggctctgcgttccgcctccgcctgtttcttcatcgcattcacagaaatgagcaatactgcgacggaccacaatgcgcacacgacgcttgagatcatcgccggatacaacataacgaaaaccaaaggaatcagaagtgaacatgccgcaatccacggcactcttttccaagatttcatggcttctccccgttctacaaaactcggttggtctacacccaccgtaaccaagtataacatgtcttttctgccagttcattatcgaataaccgttgaatacaaaaaaccttcggcaaaaatgccgaaggctccttaggcggaatgccgatattacgcttctactgctgctgctacaggagcaacattaacagggtagatgcttacttttttgcgatcgcgtccccaacgttcgaattttacaacgccgtcgattttcgcgaacaaagtgtcatctttaccgatgccaacgttagttcctgggtgaattttcgttccgcgttggcgaacgagaatgctaccaccagttacagtttgaccatcagcacgtttaacacccagacgttgagcattactgtcacgtccgttcttcgtggaacctacaccttttttcgatgcgaataactgaagatttaatttcaacatgattggttgtcctccttctttgcttatttgaattgctgtattttaatatacttcccgtatgactctgcaatattagagagcataaccaccatggattcgagtaacaattgtacctgggaccaggtttcccctctctctaacaaaggtaaagaaccgcttaaaaagccattcttcatcttggtatccatttcgacaccggtcaatgtttcaatcgagttcaccgtacccactgtaacagcggataccccggcacatacgatgtcttctccccgcttggcaaaattagcatgcccttcaatggaaaaacgttcgatgttcccgtcctcatcacgaaagatttgaacgataatcacttatcgcaccttctttacgctttgattgtttcgatagttactttagtgtacggttgacggtgaccttgcttcacatggtagttctttttaggtttgtatttgtatacgataaccttttgtcctttgccatgtttctccactttagccgttacagtagctccggaaatcaatggtgtacctgctgtcaaaccttgatcgttagatacagccaggacacggtcgaacgttacgctttcgccatcgttcgcagtcaatttctcgatgaacagaacatcgccctcttggactttgtactgtttgccgcctgtttcaataattgcgtacatttgccttgcacctcctcatgtctcagactcgcccgttctcaggtgacagtgtccttgcgaaactgttcttatacccggccagtgcggttacagcatgtgcaagaccattaggctaaacacatacttgaagattatatcacgcaatatatcaaaaatcaatgcaaaggtgaaatatatctttttcccgtaccatggcaggaagaacacggctccacatagggtaacgtactttcttctcgcactttcttacgggtaagttcgagcaaacccagtttggtccaacccattacaaatgctttggtccgatccttcttgagctcaccctccaaggttgctgcgacttcatgccgattcgaagcttcctccatatcaatgaagtcgacaataatcatgccaccgatatcccgcaggcgcattagacgggcaatctccactgctgcctgtatgttggtctctgtcacggtctcttccagactgtcaccgcctgctcccgtatatttacccgtgttcacatccactacagtcagagcttcggtatgatcaataacaatgtatccgcctccgggcaaccacactttccgagcaaaatccttattcaactgttcctgcacaccataggcagcaaagatggattctgttccccgatacacctgtactttgggttgatgaccaggactaatctcttcgagcaatgcttttacctcacgggcttgtccttcactatcagtgatgacttcgtcactccctggcgtatacacatctctgatgattcgctgtaccatgctatgatccctatgcaagaggcttggtgaaggcaaactgtccgctttttcacgaatcagataccactgcgcgcgtaatgtttccaagtccgacttaatggcttcatgctgctcttctccagatacggtccgaataataagtccttcttcatcccgcctcagttgctccccaagtgccttaagacgggaacgatccccttcacgggcaattttcttggataccgctacatagtcagcaacaggcatgtagacaagccaacggcccgggagtgaataatgagtcgtcacccgggctcccttgcctcctaccggttctttcagaacctgaacaatgacttcctgacccggacgaagcaactccgagatggaaggcttcaccttgggctgtttctccagatggggatgcaacacatcgtccacatagagaaacgcattctttttctgaccaatatccacaaaagcagcttgcatacctggtaacacattcacgacccgtcccttaaaaaaggaacccagcagtccacgatcacgtgtacgctctgccgtaaattccacagctttgccttcttccagaagcgccatttgcatgaggttatgttcattatgtactatcatttgtttcatggcttcacctctagaagacaattcaaatcatccacatccatttcagtatcttttcaattctcattgtacatatattaacccatttcagaacaggtccaccagaacactacaatttattaccattttgttgaaaataggaaccgataatccgttgctcaggcaatacggccataattcgaccctgtctgttcatcacgtataccatatggtatctttctctctttaatagacgcaaaatagtgtccaaaggtttcgccgggaatgagattattggctgcgccaaactgccagtagccgcgtgacgagcaaacgcaccctctcgattcatcagaaaacgaataaagcgatagggcacatttcggtaatccgttacgttggaatagaacaaaaaaaggccgattaacagaatgttgagcggtaggccgtagtctccagtaaaccatcggctgatagcatataaaataacccctacgctacacagaatgctaattctgtaagtccacattaatgttgtatagtaaggtgcccacagactgacaagtgcctgaacaactttacctccgtccagaggaagtacaggcaacagattaaatagggcaatgagcaggttcccctgaatgatatagttgagaaataccggatcgcccagattgccatactgcaacagcataaccacaccaaccatcaggatgttttgtaatggaccagccagagcaatcatgatttcccggtaggccgtgatcgtacctccatcttcgataaccgcaactcctccaaaaggaagcatctggatcgacaagacacgatagcccagaagtgctgccgccgcagcatgtccacattcatgaatgaatacgatggcaaacaacgtaataagctcaataaaatgtccagtcagaagggaggccatcattataattacaaaaaacggatgaaacgtaatatggactccccacaccctaatcaagggcaacaacttccgccgggtctacgtactcctccccctctttgactgcaaaatagagcgtggccggttgttcaccacccgtagccttgagactccccactggattccccgcttccacccaatcattcacgttcacttcactttcgttcagccgaccgtatattgccgtgacattgcctgtatgttggatgacaactgtgaatccacttgctgcatctccgataacctccattacacgcccagcatcagaacttgcgacctgtataagttctgcacctgcggcatccggaacgatctcaattcccttcatgctcagcgcaaatggctgaaccaccgtgcctgagatcggtttgcccagcaactgccttactttcaatccgttcacagcatccgtcgtatgtccgaggaccggaagaaacgaaggcgttcctccaaaatgccgttcataccaagccgctgctgaggcaaaatccatatcccgatggagtgcatccgcaattactgttttgggtgatgtcgtccacgatgtatccaactgaaatagaccccatactccgccaaatatcaaagcgctaataaccgtccgtttgagaagtgacttgaacaggttaaatctcgaatgcccccctggaacgaaatgaccattctcttttttccacaaccattccggatctctttcctgtgtcccctcactaggcggcgtaaatggttttgggtgtatgatctcattcttgtccaacagtgaacctaatttctgctcctgtaagacctccacagtggcaccatccatcagtcgccgaatgcgttcttctcgtctctgcttgattctgagtttcgtgttcatggaatgtcctcccgccgaggcttgtttactacatcctatgaagaggtggttgataatatgaacaagcctgcccgcaggtaacaaaaaaagccgggctataagccacggctgtcatgtaatcagataatgaataagtccgtttaaatgagttaacccattcccaagaactttttgaaacgagtaaaagcaccctttttctgctccagctgcatcaatgggaccgtatctcccagaatgcgtcgtgcaatgttgcgatacgcaatcgccgcaagtgaatccggattcatgaccgtaggttctcctgaattggccgctttgatgaccagttcatcatcaggcacgatgccaatcaggtcaatattaagtacttgtaaaataccatcgatatctaacatgtcacccgatttaaccatattattgcgaattcgattcaccaccagctttggtgattgaatgtgcgaactctccagcaggccgatgacacgatccgcatcacgtactgcagcattttccggtgtagtgaccacgatggcctgatctgctcctgctaccgcatttttgaaaccctgctctatgccggctgggcaatcaataatgacgtattcaaaatcttttttcaattcaaggataatatccctgacctgttctggcgacactgagtttttatctctcgtctgcgccgcaggcaacatatataattcttcgaaacgcttgtctttgaccaaagcctgattcagacggcagcggccgtccgcaacgtcgcacagatcgtaaataatacggttttcgagtcccatcacgacatccaaattacgaaggccgatatcggtatctaccagacaaacctttttgccgagcagcgccagcgctgtcccgatgtttgccgaggtggttgttttacccacgccgcctttacccgaagtgatcacgatcgcctctcccatgagctacactcctttaaacacattaaaatctcggcgtaaccgaacgatattgctcattttgtctatctgcatctgattgtcctgtaagtaagcaaattccattccggtctctcggctctcccattcatcgggaggacgactgatgatatccgcaatccgcagctgcgtcggtgcaaataccgaagcggcaatgatcgcttcctcgtccccgccaattccggcatgagccatacctctgagtgaacccaacacatatatatctccggtacacgtcactgtgccccccggattgatatccccaagaaacaggagatttccttcatgatgaagcacctgacctgaacgcaccataccacacatggttacaatcggcggtggtcctttaacctccggttggagtgcaggtgagtcgatggatcgaataagcagattccctttttgcttcaatatatcgaggattgcttctttctggtcctctgtcacttcgcgggcacccaacttgatatccacatgaacaatcggtccggtcaaaatattttgatggctgtgttccagcttatagcggagctcatagagcaattcctcgaattcacattgatcgtccaacaggaaaaccaggccgtctcggatgcctttaatcgttacgtgattcgattttaccgtcataagcctgtccctcccatctcattacatttcgtgcccggggccccaagttcctgctttgcgctccataaatgtatttaggaagcttcttctgtcttgctccgtctcttgccgatccgctccagttgtttccgaagggggacataaatgatcaaggcaaacacaaaatgaatgaacaaattaggaatcatgtattcaatcaacgcccagtcaaaggtcacgtggttaagttggaagagcttgtacaggaaaaatagcatggtgtcattaagcagacttcccaaaatgacaaccgataccataaccggcaagggtgcacgaggtgcttgaaaaatgagtcccatcatatatgccgataatcccatcgagaatccataaggtccaatcatctcgccgtagaatacaacgtcatgcaatagtccaaaaaatataccgagtactagtgccgtgtgacgatgatgatatacagcgataaacaaaattacgatatagaccagattggcagaaatacgcatctgccagccagaagggatgagcagtggcaaaattgtgccttccgcaatgaacaaaaggaatagtaacaggaacaaaacttgcttacgtgttaccattattcttttacctcaggcgggataatgacaatcagctctttccaatcaaggaagcttgcgtatggtttgataatcgcagttcgcgttaaaccgtactccccaacttcaaccttttccacttcaccaatccgcatgtacttcggaaagttattgatgatccccgaagagatgatctcatcaccctttttgatgtttgaatcctccgagattttggtcatcttgagcatgcccgtcttcggatcgtagctctcaatcataccaaacactttctctttacctaccgccgttgctgcaatggcattggatgtcggatcattggcgtccatggacgttaacagattaaccgttgatgtatatgagctgacatgactgatcacgccgaccagcccttcctgggaggtaacggccatccccggcttgattcccgcattttcaccgatatcaatgttaatggttctgctatttggatccgaattggcactgataacctgagcaattcgtgaaccgtaattatagcgattcttctgttcttctgtgaaattgagcgctttctgaagctgctcattcacttgctccatatcattgtatttcagccgatctcgagtgtagtgacccatcgcgatgcggagctcttcattctcttcatataccgtacgcatgttcgctacatctttgaaaaagcccgctacataggaagcgggcttgtaaaatacgtattgtacaaatccaactgaatccttcaggaatttctccggccaggatagagtggttcgcggactgagcgtaaagcccattaacgcgataaatgtaacaaggcccaccagcaaaacaaaaagtcttttgttgcctagcagtttaaacagttcgaacaccctctaacatccatattctcttccgagccatgcccggcggggagactgtcagacctgtagtccctgcgagaatatcagccgatcctcccctgttaagcgggtaatagctcatccccggggttaaccgggtcctctataaagatatcttgccacttggtcgctatgccaagttaggcaaataccaattaacgtttggaacgaactgccgaactgcttctgcttttgaacaaatgaatattctctagcgctttacctgttccgattgctacacaatccagcgggttctcagccacaatgacaggcattcctgtctcaccagcaagaagcttgtccaggttgcgaagcaaagccccaccacctgtaagaacgataccccgatccatgatatcggcagcaagttcaggcgggcatttttccagtgttacttttaccgcttcaacaattgcattcacggtatcagccagcgcttcactgatctcgtccgaagtaatcgtaattgtcttcggcagacctgttacaaggtcacgtccacgaatttccatcgtttctacttgctccaatggcattgctgatccgatgtccatcttcaattgctccgatgtacgctcaccgatcatgagattgtattggcgtttgatgtactggataacggattcatccatctcgtcacctgctacacgaaccgaacggctcgttacaataccaccaagagagataactgccacttccgttgtaccgccaccaatatcgacaaccatactacccgttggttcccatacaggcagatctgcaccgattgcagcagcaaaaggctcttcaatcgtataggcttcacgggctccagcctgtttggttgcatcttcaaccgcacgttgttctactgccgtgatcccggatggtacacataccatcacgtttggatgacgctggaacatagagcgttgtttttgcgcctcacggatgaaatatttgatcatcgttgccgttgtatcgaaatcggcaatcacgccatctttcattggacgaatggcacgaatgttacctggtgtacgtccaatcatttttttggcggcttcacctactgcctcgatgctatttgtatctgtccgtatagcgacaaccgaaggttctcgcaccacaattccttttcctcgtacataaaccaacgtatttgctgtccccaagtcaatacccaaatctttcgtaaaaccaccaaacataacataatctccttttctgcctcatatagccgctccattctgatccagagcgtaataattttattcccacgcaatacgtggagctaatattcgcatttgtttttttgcatttgtaaagtgaacctatcttttacggacaacgccgttaacattcataggaaaacatcaacgccaaccattatattatactaagcccttctccttcaaacttacgtacgttccatctccgataataatatgatcaagcacgtcaatgccaacaatagcgcctgcttcaatcagtctcttggttatttggatatcctccggactgggcgtaggatcaccactcggatggttgtgtgcgcacacaatcgatgcgctgctgcatttgatggcagcccggaacacttcacgtggatgtacaatcgaagcgttaaggctgcccatggagagtgtttcctgggcaataatatgatttttgctattcagaaagagacacacaaaatgttctttttgcaaataacgcaattgttccatcaggatatcagctgcatcacgcggtgtacgaattgaagtcgactgtgtgagtctgctcttggcaatccgatgacccagctcaatgccagctttcaattgcacagccttggcattgccgatccctttcatcgcggtcagttcttcaagactcaaatccatcaacgagcgaatgccacccgcttcggccagaatccgctgtgccatatgcaccgcggattcctgtctagtgcctgttcgaagtaaaattgccagcaattcagcatggcttaaggcgcccgccccgtattccatcatgcgttctctcgggcgttcttcctgggggatgtcgcgcatcatgtattgaggcgactccatatgttccctcttttcatttcacaacatttggcttcattcatgttcgtggcaacacatgtacgccgaacccgtccaacatatcacttagtaaagatagcggcaagccaaccacattaaaataacatccttcaatgcggtcgatcagtgaagcaccaatgccctgaatggcatatgatcctgccttatctgaaggctcacctgtctgcacataagcacggatggtcgcatccgacagctctttcatcgtcacatcggtctggcggtaatgaactaacgactgtccattgccggcatcaatacaagcgacgcccgtaaacacccgatgtacgcggccctgcagccgggataacatacgttcagcatccgcttcgtccaaaggtttgcctagaatctcaccatccagaacaacaacggtgtcactaccaacaataatggcttcctgctcgcggccttcaagcccgcgatacacggcaagcgccttgcgcaaagcaagttcctgtaccgtctgttcaggtgtccactctggtggtgtatcttcattggcatgacttggtattacatcaaacgctaggtggagtgatgcgatcagttctttgcgccgaggcgatgtggaggccagaataatagggcgctgttgtgtgttatccaaaatgaacggctccttatgccacggcaacatcctgtccggatcacgataatagatgtcactggtttaatttttttcgtcataactcgtcattctcctacagtctgcgatacagccacacagcggcaatcataccgatcagactcagaaggctcatttgaaattgaagtgaaatattataactgataatatccagatcagcctgtggcgaccaacgtatggtcgtggctttcgtaagaaaggctactgcctttacaggctgcagtgccttggcgatccacgctccggccatccagccgagcagcagaaacagcaataacatgccgaagttttttttcatcggtaatcttccctcgccattttttgacacccacattattatacggggttttgtacgtcaatacaaacacaaatccggcaaggggaactatttccagttccttgccggatgggtatttccaagcgttgttatgggaaagagcatgttactgctttatcgcttcgagccattttttctgctgcagtacatattccatcagatcggactgcacggaccacatgtgtacatcatccgggtttttgttgtactccgcgatagccgtaattgcactgttcattgatttctccattccaccaataataggttgtacatctgcggtcaggccaggtgtaagactattcaatcccgtcagccatgactcgtgcttattttgaatcgcggtcatcgtttctgtagaaactgctgccggagcagactgtcccagctgctgaatggacaaagtagataattgttccaccagtgcagaactgtttgtgaagaaaagctgcacatcctcttgtttgccaccgaatatagccggattgatctcagggttcacaatctccttgacatacagttcaactccctgggcttttagcctggagctaagtagcttggcctcttcacgatcagccgaaatgcctgcatatactcgattgccatcttcaggatcagaacctgcggctatccctgcctgagcgagctcaagcttggcctgctcagcacgttcaggagaactgaatacaccgtattgaagtgcataatacgtgctgccagtcgtagctgtctgaagttgctgttctgtacctgcagccccctcctgacctgtcacagtagaaactgcctgattgacgggcagaagatcgcctggcttcgcggctccttctttattaaaaaatgaaagaataaccatgccaaaaagcgctccggtaacaagtgctccagtgacagaaccaatcattttccatccccttggagggcgattgcgtttataggaatagttctccgaatctgcaagccagtcgtggccttgatcatcatgggtattggacagatcacgacgctcttcctccggattatcggtatgattaacataaccgtaaccggaacggttcccaaaataatgggcctcatccaagttcaagttcgaatcatgactcacccgctcgtcaggttcaggtacagtagagcttgtcagcactgtctctccccagtctccggggatatcctcaggcgtccatgatggggttgtatccatctgcttaggcgttagcggttgattatgcggtaattcttcacttaacgtcaccaatggactggacgcagatatcctcttgttttcaggcttgtccgactcatgatccccgaagcgaaacgtcattctagcattgctcacccgtaccctctcctttgtcccatttatataagctatatgcagagactggagaatacattccatataacgcaaaaaacgcctgcttcgtatcgaagacaggcgatttctcaattgatctatttcaaacctttggcaagtgtatcgccgactttccaaatatcacctgcgcccatcgtaatcacaagatctcctggctgcagacgatgctgcaaatcagccacaacttcctctttcgttgggaggtaacgtgcagaagcattactgttttgaacgatcagttcaaccagtcgggctgaggttaccccttcgatctgtttttcgcccgcaggagaatagatatccgtaataagcacttcatccgcttccgcaaaagcacgactgaacgcatccagcaggaagaacgtccgcgtataacgctgtggttggaataccgcaataatgcgtttgcccgttgctttggcggcactaattgtagcttcaatctcagtcgggtgatgagcataatcatcgatgatcagcatatcacgcgcctcgcccaatacctggaatctgcgtttggctccgtggaattggatgatggctgctacaatcttctcaaatggaatgcccgcttccaaacaggtaatcacagtagccattgcattataaacgttatgcttacccggcactgataattccaccgtgcccatagcagcaccctgatgattcatcgtaaaggagatacggcgatcgcccaatacaatatccgttgccgtataatctgcagcacgatcaataccataggttgtaatccgtgacttgagttctggcaaaatcgcttgaacattctcgtcgtcagaacacacaatcgctgttccttccggacgaatctggctcaggaactgcacataagcccttttgagctcctcaaaatcactgttgtaattctccagatgatctgcctcaatattggttacaataccgagccatggatggtactgcaaaaacgaaccatcgctctcgtccgcttcagcgactacccagtcgccttgaccggccttcgcgttggtacccacattcatgatctctccgccaataatgtatgtcggatctgtatcacatttatccataacaagtgcaatcatggatgaagtggttgttttaccatgagccccagctacagccacacctttacgttcgttcaacaaacgtgcaagcatctgggaacgatgcagaatcggaatgttcagctctgcagctgctacccgttccacattatcagcaggcgctgctgtagagtagacaaccagatctgctccagtaacgtgctctgccgtatgtccaatatatattttcgctcccttggctgccaacttctcggtcaactcctgtgaagcgacatccgatccggtaacggtgtatcccatttccaacataactcttgcgatggcactcatgccatatccgccaatccctataaaatgaacgtgttccgatgtatttaacaaaactttcaccaacctttttcagaatcggtttgatgcaaaagggctgcccgcacatccgcaatcaggtacagtgtgccggagaccacccccagatcttccgcttccgtccgtgacttcaatagatcaagtgcctttgcccattcgggctcgacgatgatttccagttcctgcttcgcaatggcgggacgtacccgttcgacaatctgcagcaattcggctgcatccattttgcgtcggaaatctggctcggtcaggatcagcgtatccactagtggcagtatatgctgcaaatacgcttcgtgatgcttatttgccaacatacccatcatcaaaattaacttgttgtgcggatagacatccataatgctcttggccagtgactctgccccttccggattatgtgctccatctagcacaattcggggttcatcgacgactttttcgaatcttcctgcccagaaagcattctccagtccaagtgcaatatcgttgtcatccagcataaatgccatgtattgtctaagcaattcaagcaccataagtgcggccgctgcattgtcacattgatgtgagccctgcatgcgtatgcgaacgtccagatcacggaacgggcctgtaaaatgaaaagattgtccgttctcattgctgtccagtctatgataagagaattgatctccagccaaatacacgcttgattgcagctgctgtgctttctcctgaatcaccttcacagcttcgggttgagtcgcgcaagtcacaacgggtactcccggcttgataatacctgccttttctccagcaatctgctcaatcgtatctccaagcacatccgtatgatccataccaatgttcgtgatgacggacacaacaggtgcgacaatattcgttacgtccatccttccccctagccccgtctcccataccacaacgtcagggtaacactcctctgcatagtacagaagcgccagagccgtggacacctcaaacatcgtgggtgatccaagcggagtggaggccatttccctgaccagtggatgtaatcggttcgagagcttaagcaggatttcttcaggaatatcctcaccgttgtattgaaaacggtttgtaaacttggtgatataaggcgacgtaaaggtacccacatcatatccagcctgaagaagcactgacgtcaaaaaagcgcaagtcgaacctttgccgttcgttcccgcgacatgaataaatttgagacgttggtgtggattgcctaacatggacatcagactctcgattcgttccaatccaggtcggatgccaaaaggaataaggccattgatccagtccacggcctcgttgtacgtaagtaaaggagctgctgcatctgtcccgtctaattccgtcatctgattcaccttcggtcccgagtttgagtgaaaaaagcggccggatggcataatggctctccatccgacccacatatattaacctttaagttccttgattcgtgcaatcactttatcccgtttatcggaataatctgcttgtttggcgcgctcttcctcaataactttggcaggagctttggcaacaaagccttcgttcgccagttttttctctacacggagaacttcgccctcaaggttctccaactctttctccaaacgagccacttcctgctcgatatcaataagacctgcgagcggcaagtatagttctgcccccgtaatgatcgcagtcattgccttatccggtgagtttaaatccagcccactatcgaactcggacgtattacagaaacgtttgatgtagtgactgttacgcgcaatgatgctggacgtctcagcactatttgctttgaccatcagctcgatctttttgctcatcggcacgttcacttctgcacgaatgtttcgcactgcacgaatggtatccataagcaggttcatctcggcaacagcctctgggttctcaagagcaggatcatataccggccatgatgccagcgtaatggtctcaccttcatgcggcagatgctgccagatctcttcggagatgtatggcataaacggatgaatcaggcgcatggtctgatccagcacataagcaagcacggattgtgttttcttcttggcaaccggatcttccccatagaaggacagcttagcaaactcaatgtaccagtcacacaggtcatcccagataaagttatacaacacacgacccgtttccccaaattcatacgcttcgattagacgcgtaatatcgcgggaagtttcgttcagacggtgcaaaatccaataatcggctgtaccaagctctccgctaatgtcacgttcctcataggtgaatccttccagattcatcaatgcaaagcgcgaagcattccagatcttgttggcaaagttacgagcctgctccactcgttcccaacggaaacgcagatcctgacctggggtgctgctggttgagatcatgtaacgcattgcatctgcgccgtatttctcaatcacatccagcggatctacaccgttgcccagtgatttggacattttgcgtccatctgcatcacgaacaagaccatgcatcagcacatccttgaacggaatctcatcggtgaattccaatgcagtgaaaatcatacgtgcaacccagaaatatatgatgtcataccctgtcacaagtacacttgtcggataataacgtttcaggtcttccgtatcttccggccaacctagtgtggagaatggccataagccggagctaaaccaagtatcgagtacgtcttcgtcctgtctgagcttgcgtccagcatactctggcagcgttgttggatcttcagcagatacgatgatttcacctgtttcttcatcataccaggcaggtatacgatgtccccaccacagttgacgggaaatacaccagtcacgaacgttttcgatccagttcagatagattttctcaaaacgatctggaacaaaattaaccccttcgccgctctgttgtttcttaatcgctctctctgcaagtggcttcatctcaacgaaccactgtgtagacagatatggctcaacaacagctccggtacgttcactgtgtccaacctgatgcgtgtgatcctcgatattgatcaatacgccctgctctttcaagtcagcaacaatctgcttgcggcagtcactgcgatccagtccttgatactttcctgcctcagcattcattgtaccgctctcatccattaccgtaatctgaggaagatcatgacgaagacctacttcaaagtcatttggatcatgcgcaggtgtgattttaactgcaccacttccaaactctttatccacataatcatcagcgataattggaatttcgcgtccaatgataggcagtacaagtactttaccaatcatatctgcataacgctcatctttcggatgaacagcaaccgctgtatcacccagcatcgtttcaggacgcgttgttgccactgtaacgtagccacttccgtctttgagcgggtaccgcagatggtacaggtgaccctgaacctctttatattcaacctcaatgtcggacagagctgtccggttcaccgggtcccagttaatgatgcgtttgcctcggtaaataaggcctttttcatacagttgaacaaatactttgcgaaccgcttgggacagaccttcatccagcgtaaaacgttcacgagagtaatcaagcgacaatcccatttttccccattgctgacgaatggtagtggcatattgatctttccagtcccatactttctccagaaacttctcacgtcccagatcataacgagtcagaccttcttcacgcagcttctgctccactttggtttgagtagcaatacctgcatggtcggaacccggaagccacagcgcatcataaccttgcatccgtttggtgcggatcagaatatcctgcagtgtaaaatcaagcgcatgcccaatgtgcagcatcccggtcacatttgggggtggaattacaattgtatacggctcggcatctttacgttgcccggctttgaaatatccacgctccatccaggtggagtaccatttatcctctgccgccttaggatcgtaagtggtcggcatttctgttgcagctgattttttttcctcagacatgtgtcattcctccgttacttcatcatcttcgccaaaaaaaacaaaaaaaacctttcatccatcaaaggacgaaaggttagctttcgcggtaccacctttgtttcacgcctacagcaagatagacttcaccctctgtacatgacgtgacacttcaagcagataacggctgctaccggcccatcctacctcagtaataaatgacgataaatctcattcatcccttgtattcaaacaggcaactcccgggcgacttcgatcagttggttcctgcggaatctcacagcgctgcaattccactctctgaaaggtcatactgtctactactcccgttccacgttgttcttcaaaaaacctacacacatcataccttgctcgtgcgcgatagtcaacctgacaacagcggataaagagcgctggaatgcaggtttaggacgaattatgcaaaaacccgcaatcctcaaggggatcacgggtcgtaacgaaggctttaactacggattaagggatgtacaatatctgaccttcttccacaacctgctcagataatcggttatacaactgaagttccctcgtgctcaattgatatcgatctgcaatggcatccagtgtatcttctcgctgaacaatgcacagtttcaccttgcggaatggggtctggtccacgatcgttcccaggaacaggttcttccattccacatcatccgctggatacgtttcttcctgtaccacacccgcaggaacctcatcgcctcgctccacttcagcatcgcgtgccgctctgccagaggataacaaggaagaaatacctacgccctcttcttgccgtggtgcggattcttttttgctgccaaaagcaaccttcagctccggcttgtcttccgtctcagccacaggttcaggaacaaatgcttcgttctgtacgaactcgtctaccccagtcgcttcaaaagacggtcggtcttcctcagggttgcctggttcggacgaagcaaatacaccttgccagttctctgcctgtgattcaactgggacatctgcaactgcctgattctcctgctgaggtacagatctcgctgattcgaagtgccatacctctggtgcgtccggtacatccggtgctgccaagtcattagatgattgagcagtaggctctgagactgcttgatctgcacttctcgagttcgcaggtaatgcatccacggaaggctcggaccaacccgaagactcatcttccagaggcaacaatggttccgactcagggtaagaagctaatcgatctgcggtctcagccataaatgacgagatcggagaaggttcgctgtattgctcatgagatgccaattcatctccattcgctgtcagagatgcgggatcttcatttgcatcaggttgtctgttttcgttaacgtactccgcacttagctcctcagattgaagtggctctgcagatgacgcattcgcataatcctgctgccattcttcgctattccttaatgtctcttcccgtgtggacaggtcagcgaattccggagcaccatatgcaagttctgctgcattcgcaagtctctcttcctcactccgctggagcaggtactcttgtgcaaatgtgttgggatcgctacctgcctgtgctgcttcatcggaacggttggattgctgagcatcaggtgaatgaacaactgtaaactcatctgctgaccacacttgtggctcttcaacaggaaaaccttcgatacctcgtagcgacaacacgcctgtaatgttcagactgcgattggataacagatccacgtcaaaattttcgatctcgatggaaatatcttcaatcgatctgacccggttcagcggaactgtgatctccacgggaatgaaatgtttgagctcctctgaagcctcattttctcctctgtacgcacctgtaagtaaaagatgccctcttaatgtggcatgatcatcctgccctatgacttgaatgcgtgggtatagttcaatctcctccaattcctcaatcgcaggaactccctcagacaaatgaacgcgctcataaatatcgaaccgcaaaccataaggttgattcaacaaaggtggcgtcctcctttcggcatatgttcaccatgatccttctcatgggactgatccatggtccaaatccttcgttaccccatctatatgccttgaatgagaggagcatgccaccttttgaaaaaccttgctatatatgttcaactcatggttatttacactgtcactccaatgacagaacaaccttctgatcgctgttatccccagatttttttcattcccttcttcaaagggaaaattcggggatagcttatgcttccgaagtagctttctttcagaaagcttttaggcgaacgctttgcttcttctggttgtttctgtcctttccattttcgtgtaaatagttagtcgaacttatatagtgtattagtaagacccctctcgctctgccaattgtgtgaaatcgggcggccaagggtcgttcacttcaatcatcgctccggttaaaggatgactaaacttaagcatctctccgtgaagagcctgcctaccaatggcatccgctctaccttcatacaacgcatcaccaatgagcgggtgtcccgcgtaactcaggtgtacacgaatttggtgtgtgcgtcctgtatccagctttaatcgtacaagggttgctctttcccacactgcgacggtctccacatgagtaacagcttcctgtccaccttccgagacacgtctgcgctgcttgtgatgtctatccttgccaatcggagcatcaattttgtggagttcaaggggaatttgtccacctgcaatagctacataatggcgaccaatctctttgcgacgcatcgcttcatccaatttggcgagggcaaaagcatttttggcatacaggacaggtccggttgtatcctcatccagtcgatgaacatggcgtacgcttgcctgaattccgttcatttcataataagaggcaaccacatgatccagcgtgatggcctgattggcacggtttccatctggatgcagtttcatgcctgccggtttgtgcataaccagacagaaatcatcctcatacaatacatccacatcagcccagcgtggctcaacatcgattggctgggacgcaaaaagggccagccgaagccggtcccctgcaagttgtattcctcggtttgcttttaactgacggagcagtttctccggaaactgaagttcagacaataaccattgctctgcggccatcggtttgtccgagctgcctgttacggctttccctggcatcagctcaagccattccccgcggcgtttccaacttttgatggtcatagcgattgaagagctttacgattcgcctcaatcgtatcgtcaatatcctgctccgtgtgcacaccagagacaaacataccttcgtattgcgaaggcgcaacactcacaccttgatcaatcatggccgcaaaataacgacggaattgatccagattgctttctttggcaatatcataattggttactggaacggcactgaagaatggacaaaccatggaacccacacggttaatggttatcgcaatacccgtctcagctgcatttttctcgaatccggcttgcagacgtgcagacaatgtctccagacggtcatagacctctggtgttaacaatttgagcgttgtataccctgctgccatagccagcggattcccgctcaatgtacctgcctgatagattggtcctgttggagcaatctgttccatcagatcccgacgaccaccataagcgccaaccgggaggccgccaccgataactttacccagacaagtcaggtcaggtgtaaccccataccgtccctgagcacagttcaaccctacgcggaaaccggtcatgacttcgtcaaaaataagcaggctgccatattgggtcgtcaaactccgcaggccttcaaggaaaccggaagccggaggaacaacccccatgttacctgccacaggctccacaataacagcggccagttcttcaccataacgttcaaaagcaagtctcacggactccagatcgttataaggcaccgtaatggtattcacagctacgccttcaggcacgcctggactatctggaagacccagcgttgcaacacctgagccggccttgatcagcaagctgtctgcatgtccatgatatgatccttcaaacttcagaattttactgcgtccggttaccccgcgtgccagtcgaatggcactcatcgttgcttcagttccagaattaaccatccgcacgatatcgatagaaggtacacgctcacagaccagttttgccatctcggtctccagcaaggtaggcgcaccaaagcttgttcctttgagggctgtctcacgcaaagcttctacaacgtcagggtgtgcatgtcccataatgagtgggccccacgatcccacatagtcaataaaaacattgccatcaatatcgtagattttggacccttcaccgcgttctgcataaatcggagtaagtcccaccgatttgaatgcgcgtacagggctgttcacacccccgggtatgtactgcttcgcttcctcaaacgcgctgcgtgagcgctcatcattgcgacgattaccttgttgtgcagtcatgaatatcctcctcaatgtaatttattttatttctcagccaaccagcgtgaagcgtcttttccgtagtaggtaatgatcatatctgcacctgcgcgtttcatgctgagcaggatttccatggcaacttttttctcatcgatccagccttgaatcgccgccgccttcaccatggcatactcgccacttacattataggcaacaagcggaagatcaaattgatccttaatcgtacgcatgacatcaagataggacagcgaaggtttaaccattagcatatccgctccttcgagcacatccgtctctgcttcacgcaaggcttcacgcgcgttcgccgggtccatctgatatgacttgcggtctccgaattgtggtgtggaatccgcagcttcacggaatggaccataaaatgcggatgcatatttaacagagtaagacataatcggaatgtgactgaatccattctcatccagccccgcgcggatcgcttgtacaaatccatccatcatgttggatggtgcaataatgtccgctcctgctttggcttgagacactgccgtttgcacgagcagatcaagtgattcgtcatttaacacatctccgcagatgtgaccgtcaatctccacggtgtgtaccataccgcagtgaccgtgatccgtgaattcacacagacaagtatccgcaacaaccagcagttccgggtaccaggatttgatcaatctcgtcgcttcctgcacaatgccatcttcagcgaagccagatgaacccacactgtccttcgtctcgggaataccgaacaataacacggctggaattcccagctcggcaatttccgttacttcctcctgaagacgatccagcgagaagcggaatacgccaggcatggatttaatttcagatttcacattttctccatacgtcacatagatcggttgaataaagtcgtccacagttagatgggtctctctgaccatattgcgaatacctgtggattgacgtaaacggcgatgccgtacaattggaaaactcatacgagtaaaacctccctgaaagttaaatagagcaaaaagggaagcgcgctggtatcctatcgaattcagcacgcttcatatgttgacatgattacatggatcaatttcataactcgctaaaaatggatttcgtaactaaatatagacaaattgaaccgttttgatctatatctagccttgattgaagcagctaaaggtattatgaaattgattcccatgtgtattaatttcgaagagcgccttctttggtgcctgtccgtttccagtcgcatagcactgtaatcaagctatccatcgttgcttcctctgccatcagtgtaacctttagtccagcggcttctgccgttttcgctgtaacaggcccgatacacgcaacctccacatctttcaatagaggcagtggatcttgcaaccccatacgtttcaacatactcatgaagttggtaaccgtcgatgaacttgtaaaggtcaccgcatgaattccaccttcttcaagtagcttgagcagttcgtcatcatcctcaccagcaaggatcgtatcgtaggtgatggcttcggtgacctgaagtcctcgttctctcaactgatcacgtaaccacgtacgtgccagatcaccgtgcggaagcaatactctctgaccttccttcaattcgctttcaaaagcctcaagcatgccttcggcttggaaaggacctttgacaacttcagctacgatgccatgtttgcgcaaagcgtccgctgtggaaggtcctacggcagtaattctcgcttgatgaatcgagcgaatatccttgccttcctgttccagatggcggaagaaaaactccacgccgttcacacttgtgaaaaacacccagtcataggtatttaaagcactgaaggcgtctttgacactttgcttggcagattcactggatggcatgaccgtctcaataaccggaaactcatacggttcgccgccgagttcctcaatgcgattcaccagttcactcgcctgactgcgagcacgggttaccagaattcgtttgccaaacagcggcagcgcttctgcccatttcaattgttcccgctgattgacaacatctcccaccacaataacagctggtggttggaaattggctgcgatcactttcgcttctatatcttcaagggtacctgtaagggtatcctgttccgctcgtgttccccaacgaatcagagctaccggtgtttgcgctggacgaccatggcgaatcaattgttcgctgatatatccaattttggcaacccccatcataaatacaagtgtgcccgtcgcattcgtcactttatcccaatggatactgcgatcaagcttgtccggactctcgtgccccgtaataatagagatggaagaggcatagtcacggtgagtcacaggaattccggcatacgcaggtacacttattgcagcggtaactccaggtacaatctcaaacggaattccgtttttgtgcagcaaacccgcctcttcgcccacgcgtccaaagatagttggatcgccgcccttaagccgaaccacaaccttgccatcaagagccagatcaaccaacagttgattgatctcttcctgtttcatcgtatgccgatccgggcgcttgcccacgtaaatcttgactgcgccgggtttcatttgtttcaacaatctcggacttgccaaacgatcatagactacagcatcggctttcccgatggattcccacccttttaccgtaatcagctttgcatccccaggacctgcccctaccaaaaagacctttcccaccatgtcttcatcccctaacttctgccagtatctgctctgctccccgttcgatcaatctccacgccacttcttcacccagacgaaccgggtccttgccgatcatagcttccttaagaataagtccaccatccggtgtgccgaccatacctgttaattgtaacgtgttttcaccattcagggaatctgcatcttgctgaggcacccacaccgcatgagcaccgatcggaacctggcagcccccatttaatacactgagaaaacggcgttccgcctgtacaggaaatgctgtctcggggtcgttatacagctgcagcaagtgcaacagttcctcatcgtcttcacgacattcgataccaagcgcgccttgacccactgccggaaggcaagctgtttccgtcaagtactctgtgatccggtcttcccagcccatacggtacaatcctgcagctgccagaataatcgcatcgaatccttcggtctccagcttccgcagacgggaatcaatgttgccgcgaatcgattccaattgcaaatctggacgataggcctttaattgactcgaccggcgcagactgcttgttccgactctagctccttctggcagttgatccagagtaagtccaccattggagatcagcgcatcccgtggatctgcacgacgaggaatagcaccgttgattaatccttcgggtaactcggaaggcatatctttcatgctatgcacagccatatcaatcgtacgatcaagcatcgcctgttcaatctctttgacaaacagacctttgccgcccacttttgacaacgttacatccagaatgagatctcccttggtaacaatcttatgtacttcaaagtcaaaagctaatccttcccgctcacaaatatcgcgtaaatcctgaatgacatggcctgtctgggttagcgcaagcgcgctctgtctacttccaactttaattgtacgcatatctacacttcctcctcattacgggatatccagtccccgatttcttcttcggtccaccaccgaaaatggcctgtaagaatatcttctaatatgtgcatttcagttaattgccgaagcaacgtacttctgagacttgaagaagatacgcgtgacttcacctcagtcctcatctggtgcaaaaactcaaggtacgtctcatattcatcaccgaactgtcgttcgagtgtggcacgtatctccgcagctgctgccggtcccgctcctgctgtggagatcgctatgcttaatctcccacgccttaccacgcttggtgtaataaagctgctgtgctccgaagacattgcgttattcaccaatatgcccgcagcctccgcatcccgaaccacagttgaattgacctctgaatggtcagtcgctgcatatacgagaaaggccccccgcaaatctccattgcggtaggaccggtctatccattgaattcgggattcatgatgcagttgttttaatacgggagtaagctccggactaatgaccgtaatctgtgcctcagcatgcagtaatcccttaattttacgttcggcaacacgtccaccaccaaccacgcagcacttcttgcctgaagcattcacaaatatcggcgtgtaacggtccatccccttcactctcccgtccaacgatgaaacgctgaatacgcattggataaaaaacttataatgacaaatccgtacccgatcagtgtccatcttgccatgataattgtagagaactgtttccttctcttggatacgaagtaacccacatagatggcaatggcaagacctgtcgcaataactttgagatccaagagcaggacccaacgtgtttccgctacgatggacaataccgcaagcatcacagaaacaccaaggagcggtgtacctatgaaattagcaccatccatgtatttgccgatcacttccaggcttggcatccgtcgcatcgtatcattccacttttttttcttcaacttacggtgcaggaacagatataacatggcaaataccgtagcaacggttaacgccgcaaaaccaagattcgccaaggtaatatgcataatgagtaatccatgtaccgtttgccagttatgcagtgatatctctccggccgtaaaccacagtcggtttaataccgtaacggaaaaacctacaacattcagcaacaaaatcacaaattcggaacgctggatgcgagtcatgacgagagacatcagcacaatactgaatgaaaatataaacaaaaaatcaaaggtggtatagatcgggaaatggccttcagtccacatgcgcaatatgacatgcgttacctgcaatccccaaacaacgacaagaaaccctgtgcctgtccgcttcgcccccgcattgcgtcgaatgcagtccgagaaatagaacagtaggctcagggcatacatatagattagagcttcataaacttgttcagcaagggtcaagctgcccacccgccttatacgcctgccggagcataagccggcacggggtcttgccggttttcgttaaggtgagcggctggtttcgccagagctgtagcatcactctgactcactttttcagcggccatctctactgcatcttccagagcgaaaatctgagtaaacatgcgcagagcttcatcaccttgcttcgtgcctgccatttccttaatccgattaatcggatctgtcgtcatttggttcacaatactcttggtcaaacgacgaatgactttacgttgatgttcatcgagctcaggcagtttattaaacaggctatccatcgtttcttcatgaatggagacacctttttcctgcaaagcgcgaataacgggacgaacacccaacgttttgagccaatggtaataatcctccatctcaagctcaatcattctctcaatcttggcagcttccaccttacgcatatccaggttgctctccacgattccttccagatcatcaatgtcatagagaaatacgttggataattcaccaatcgccggatcaatatcgcgtggaaccgcaatatcaatcaggaacaatggacgagattgacgacgcttcatgctctctcgtaccactgctgcatccatgacataacgttcagctccagtggaactaatcacaatatcaacttcattaagtcgatctagtgcctgttccatcgtacaaggtgtcccccggaacttggctgccaattcttcagctcttgcgagcgttcgattcgccacgatgacctcggatgccccgttggcatagagatgtttcacggttagttcactcatcttgccggcacccaaaatgagcaccttcttgtctgtgaacatgccaaagatcctcttaccgagttcaacagcagcataactgacagatacggcgctctccccgatggaagtctccgaatgtgcccgtttgcccagcgtaacagcctgtttgaacagcatattaaaccaggtacctgttgatttctcttcctgcgctttaagaaaagcctgtttcacctgtccaagaatctgagtctcaccgatgaccatggaatctagtccgcagatgacgcggaacaaatggcgcatggcttgatcatcttcatatatatataagtgttgcgtaaattcttcccgtggtacgttaaaccattgttccatgaatgttcgaataaaataaccacacatgtgaagacggtccaccacaacatacaactcggtacggttacatgtggctacgattacaccttccaatacactcttggtcagcttgagctgctgcagcgcttcagacaaatccttttctgcaaatgtgaatcgttccctaacctctacaggcgccgtgcgataattcaaaccaacgacaacgatgtgcattgcaagttcacctgcctaataaatttccaatcaaagtgcttactgcatatgtctatccatttatgattgacaaggttaattatatcacacatcatagccatgaccgggtcatttttatgaaatgtttatgaaatcaccatgttcatcatcatatgcactgtcatttattgtagtgtctcaccaaagttcaccgttatgcgttaaaaagtgccgatgatgaatattcataacgatacgcatattaaaacaaatagccatggaattattccatgactattagagtttgggaggttatgtgtccatcccgatatgtgaacattgtgtatgcaatatactttttatttaaacccgttcagtctggttgttcatgtctggtgtttcaacttgcaattcgcccaaaccacgtaccaacttctttgcatacgttttttcaggctttaatacggataccaggtagtcaatagcaagctgtggatctacagtctccccacatgtgtaacaatcaatcgctgcaaaacctctctcaggatacgtatgaatggagagatggctctcagacaatagtacaagtacggtcgctccctgtggatcaaactgcttggactgtacggacatcactgtcgcgccacatgcctccgctgcttcaaccatttgggcttccagatactctgcattgttcagtagattaaagtcgacaccccaagtatcaacagcaacgtgtcttccgaaagttgaatattccatccttcggttcccccttcctaggaataaaatgtttgaaaaatttcatccgctaggacctacgtcattcacttcccgagggaaaaatctctcgcaacatataatgtcctgagtgaatcctggttcctatattgttttcaacgagattaaaaataacattgaatcagagtgaaatcaacccttttccagaagattgtaaaataaatatttccaattcggaatattcgatctcacatcaaaaaatccccctgaaacctccacattggcgagtgccactgcacggaagatacaagggaattcattatatacatatacgtttataaacatacaatttaaagctaataagcttcaagctcaaacaaccgtttttgatgacgagcaagggtctcatcaatctgatggagctgatcagcagtcgcatcttttctagtgtccagtagtgaatcgatctcggcatacacacggttgatttcgcgttctacatctctggcctggaacagatgttgcaattcaagcaacgtatttttgtattcatagatcactcgggtgttctccccggtcttctccacaattttgcggacagtgccttgagcataaacatacgtcatggtgaaccctttatagatccgatgaacgaccccgtcacccttaaaagtcacaaagagcttccggacaacgttggtcagatgcagattcaccaggcggcaagataactcacagatataaaacccttctatgcggtcaaaagggaaatgcacttcttctccacttacatcccccagcacaacctcctgacaaccattgtccaacaccttaacccggtgatgaagcctgccgtcttctgtcatgcgcaaaaactgatgcatctggggttctgacaatttcatagtggccttaacgtactctgtggctaaccgctgagccatacaaatccctcaattctttcccgattgttttgccttcctgcacatgtagcagtcatctcaaaattcttcaggccggcatggccggtaattttggtactgttggcaatatgcacctatgctcattatacactaccctaacgttatttttctccagacccagatgatgaattctcacgaaattccttaaaaaaccggattaatctggatctcatcaaagattcatttagcatgctcgctttcctgcactaaaacggtatactatctcggttatccgttaatttcgttgctttcttcctcatcagaagcaccctctgcatccagcactggtgcatacttatctatgcgggcatggcgggtaatgatgtcccataactcttctttccccaatccctcttcggatgaaaacggcacaaacaaatctccggaacgaagacccagtgattccttaatgactttgatatatttggctctgcgggtttttggaatcttgtccatcttggttgctacaacaaccaaaggcagtccattatgacgaagccattcgttcatcatcttgtcctctttggacggttcatgtctcatatcaaccatctgcatgaccaatttcaattcctcgcgtcccaacaaatatttctccatcattttgccccaggcaaaacgctgctctttggaaactttggcgtaaccatatcccgggaaatcgacgaagtagagatcctgattaattttataatagttgagttgctgtgtcttacccggtgttgagctagtccgagccaaatttttacgattgatcaaacggttgatcaaggaagatttccccacattggagcgtcccgccaaagcaatctctggcagaccgtcatcggggtattgttcaggccgaacggcactgataataaattcagattgatttactttcatattgtatctttcctctcttgaacgcctgtgctatgcatcacctgttgaaggtattatgccatggattgttctatcataccaaaaaaaccgttccagcggacgccgaagcctccgcagaacggtctaatcttcatacgaacctttcggatacgtggatttacaggtgaattcctgtctgctcaacaagtgcatgctgcaatacctgatccatatgggctacagggacaaactccacatcttccttgatgctgtctggaatgtcacgcaggtcccgttcgttatccttaggcaataatatttttttatagccggcacgatgggctgccagtgatttctctttcagaccaccaatcggcagcacacgtccacgcagtgttatttcaccagtcatcgcgatatccttggacacatgtttgttcgtcaaggctgagattaacgctgttgccatcgtaatcccggcagatggaccatccttcggaatcgctccttccggaacgtggatatggatatcgttcttctcatggaagtcaggcgaaattccaagctgtgtagctttggaacgggtgtaactgaatgcggcttgtgccgattccttcatgacatcccccagcttacctgtgagagtcaatttacctgttccaggcacaacagtcacttcaatgataagggtatctccacccacttcagtccacgccagacccgttacggtaccaatctgatcttccagttcggccataccataacggaacttgccaggtccaaggtagtctttgatctcatcggatgagatgttaatctgaccttccacaccagatacgatgttcttggcagctttccggcacaacgaagccatctgctgttccagattacgcacacctgactcccgtgtatattcacgaattacacgtaacaacgcgtcatccgggatttccaattgctcttcttccaaaccatggtccttcttctgtttgggcaacaaatagtttttcgcaatttgttgcttctccagctccgtataaccagggatgttgagcatttccatccgatccagcaatggacgcggaatattgtgtaccgtgttggcagttgttataaacataacgttggataagtcaaacggcaattctacaaaatgatcactaaacgtattattttgttccggatcaagtacctcaagtaacgctgcgaaaggatctccgcggaagtctgaagccatcttatcaatctcgtccagcaggaataccggattaagtgaccctgccgttttcatcccctggatgatacgtccaggcatggcgccgacataggtacgtcggtgaccacgaatctcagcttcatcccgcacgccgccaagagatattcttacaaactcccgacctagcgatctcgcgatcgaacgagcaagtgatgttttaccgacccctggaggtccaaccagacagagaattggtcctttgagcttcttgacgagcttctggacagccagatattcaagcacacgttctttgggcttttccagtccgtaatgatctgcattgagcacatcttcggctttttggatatccagatcatccgctgtcatctgactccaaggaaggccaagcagccaatccacgtagttgcgaatgactccgccctcggctgaacttgcaggcattttctccagtcgatcaatttctttctcgaccttttctttcaccttgtccggcaagctgagttcttccatctgagtgcgaagttcctcgacctcacccgcacggccttctttttcacccagttctttctggatcgctttcatctgctcgcgcaaataatattccttctgcgttttctccatctgtttcttcacacgttggctgatcttgcgttcaagctccagcacttcgcgctcattgttcaggatatccagcaatttctccagacgctcccgaacgtcgatggtctccagaatttcctgtttatccttgatcttcaaggacaggtgactcgtgatgacatcggccagacgccctggttcttcgatgtcagacaccgctgcgagtgtctctggtgtgacttttttggacagattaatataattctcgaactggttcagaacagtacgcatcaaggcatccgtctccggatgggtattctcctcttcaggcagctctttagccagtacttcataatattcctcgttgtccgtatattcaataatttcagcccgttccaagccttcaacgagtacacgaatcgtaccgttcggaagcttcagcatctgtctgaccttggccacggttccgattctgaaaatgtcctcttgtgttggttcttcaatatttacttcggcttgggaacataggagaatcagatgttcttctaccatcgctttttctaaagccttgaccgatttctcccggcccacatcgagatgcagtaccatactcgggtagacgagaagtcctcttaaaggcagtaaaggaaaacgacgacctttcgctttgctcggtcccatcgctttcgcacctccaatggctctcaggttgtagtcattcattattctatcaaatgttcacataaaaaaccaatgaagggaagcgcttagcagcttcccgaatctgtaacctgtcctggacgaggcacgtccgcacgcaaataggaagcggatgccggtggaaaaatctccggtgcaggtgcaactgtctcctctgcaagcttcgtttgttccatttgttgtgattccggaacccaggcgaacacttcacggaatacgtcctgtaccgtatctaccgggataacgcgcaagccatccagattctcaaaaatggactgccagttctccgcgggaataataacggtcttcgctccagcctgaaaggcagcctccaccttggctagcacgccaccgataggcttaacccgaccatgaatactgatctcgccagtcatcgctgtctcatgatccacaggacgcctctgaatggctgatgtaatggcagtcgccatggcgatcccggcggatggaccatcaataggcgtcccacctgggaaattcacgtgtaaatcgtaatcattcggacgaatacccatggcttttaatacggttaacacattttcaaccgagcctttggccatactttttcgccggagtgtacgcgaaccgcctccaatctcttcttcatccacaacgcctgtaatgttgattcggccttgatctttaagagccggaacagcagatacttcgatctccaaaatggttcccatattcggtccgtataccgccaagccgttaacaaaacccacctgcggctgtgtcgggaccttccgatcaggccgtggctgaatctgactgctacccgccacccactccacatcagacgcctgaagcgtctcacgcttctctgtcagcgcaagtccagcagccagctggatgatattgaccgcttcacgtccattggttgcatatcgcttgaccacatcaacggcatccggacatggactgaaccctattttctgaacagcatcctctgcaattcgcccaatctcctcaggcaacaaaggtcggaaataaacttccatgcagcgggaacgcagagctggtggcagttcatgaggcgaacgtgtcgttgctccaacaaggcggaaatcggccggcaggccattttgaaaaatatcgtggatataagcaggagtatgcgtgtcttccgagttatagtacgcactctccaaaaacaccttgcgatcctccaatactttcaacagcttattcatctgaatcgaatgtaattcaccaatttcatcaataaaaagcattcccccatgcgctttcgtcacagcgcccggttttggttggggaataccagcaacgcccatagctcctgctccctgatatatcggatcatgaaccgaaccaattaaggggtccgcaataccacgttcatcaaaacgggctgttgttgcatccaactccgtgaatttcgcgtctggcttgaaaggcgatgttggattcttcttagcctcttccaaaacgacccttgccgcagctgtcttcccgactccgggagggccataaatgataacatgttgcggattagcactgcacaaagcagctttaagggcacgcagcccgtctttttgcccaacaatatcgttaatggtagctggacgcgtcttctccgacaacggcttggtgagtgagatcgaacgcagcttgcgcagcttctccagttccttgcgagattcacgctcaacggcactgcggtttgttttctgaccacgcagcaggttccagaaatacaaaccaatcaccactccaaaaaataactgaatcaacatgatgaccataccaaattccatgtcttcacatcctcctattttgtcgctattctcatatgagatcatgctaatacttggtagtatagccttttcaacgcgacgtaaacgggcgatgcggaatttgtatgcgagaaaataaaaagcccgccatcgctggcgagcttttgttgtaacaagatatgaatcaatcagtgcgaacgaccaggaataacacctgtctcttcgtaggcttcgacgattttgtcgatctctttttttaattcctcaaccatgatttcttcaggcactttacgaatcatcttaccatgacggaacaagagaccttctccacgagcaccggcaattccgatatccgcttctttggcctcacctggaccattaaccgcacaacccaacaccgatactttaatcggcaccttcagtttggagatatactcttccacttcgttggcaatggagaacaggtcgatatccaaacgtccacacgttgggcaggagatcaatgtagctgcatttgtgatgagtccaaatgttttgagaagatcacgagcgaccttaatttcttctaccgggtccgcactcagtgagatccgcatcgtagaaccaatacccatggacaataaggctcccatacctgcggagcttttgattgtaccggagaacagtgtacctgcttcggtaatcccgagatgcaacggatacggaatgatttgagctgctttggtatacgcctcaattgccatcggcacatctgatgctttgagagacacgatgatatcatggaaatcaagctcttccaaaataccaatgtgatacaatgcactttctaccatagcatctgccgtaggatacccatacttctcaaggagatggttttccaaagaacccgcatttactccaatccgaatcggaatgccgcggtctttacaagccttaaccacttcttccacttttgcacgtttaccgatgttacctggattaatccgaactttatcgatgccgttctcaatcgcaagtaaagccagcttatagttgaaatgaatgtccgctacgagcggtatattaatgcgttttttgatttccttgatggctgcggcagcttcctcattattcaccgttacacgtaccacttgacagcccgcttcttccagtcgcagaatctctgcaaccgttgcttcaacgtctgccgttttggttgtacacatactttggataatgacttcgttactgccacctatcgttacgtttcccactttcacgggacgtgtatcctgtcttaaatacatgagtgatttctctccccacaacgtcaaagctccaccctgacagagacaagaattcgccttctgccaaagtggagaactgacaagtctatatttcagagttcaacgggattcaggccttttattaggcgctctcttcctgcttatcgtccttcgattggcttagttcaggcacgactcttttctcaacaacttcttcggtaatgacacagttcgtaacatcttcacgtgagggcacttcatacatgatttccagcatgataccttcaatgatggcacgcaatccacgtgcacctgtgttacgtttaattgcttcttttgcaatcgcaagcaatgcagctggttcaaagaccagattcacattatccagctcaagcagtttttggtactgtttggtaagcgcgttttttggttcggaaaggatccgtaccagcgtatcttcatccagcggctccaaagtggagatgactggcagacggcctacaaattccggaatcagaccaaatttcagcaaatcttccggcaataccatacccaggtattcacctggtttcagatctttttgctcagaaacggtattaaagccaatgacttttttaccgatccggcgtttgatcatttgctccagaccatcaaaggcaccgccgcaaatgaacaggatgtttgttgtatcgatctgaatgaattcttgatgagggtgtttacggccaccttgtggtggtacagaagccacagttccttcaagaattttcaagagagcctgttgcacaccttcgcccgatacatcacgagtaatggatgggttttcggatttacgcgctactttatcaatctcatcgatataaataatgccacgctctgctttttccacatcataatcagcagcttgaatcagtttgagcaggatgttctctacatcctcacctacataacccgcttctgttaatgacgtagcatccgcaatagcaaaaggaacgttcaaaatttttgccatcgtttgcgcaagcaacgttttaccagaacctgttggccctaacagcaaaatgttactttttgacaattcaacgtcttcaattttgctttgtgtgttgatccgtttgtagtgattatacaccgcaacagacaatgattttttcgcttgttcctgtccaataacatattgatccaggatattacgaatttcttttggtttcggaatatctttcaggtctacttcttcatcatgaccaagttcttcctcaacgatttcggtgcaaagttcgatacattcatcacagatgtacacgcctggtccagcgaccaacttgcgtacctgctcctgagatttaccgcaaaaagagcatttcaactgccctttctcatcgttaaatttaaacatgaaaccacccctttaggaattgatcggtctactgagcacctggtcaataatgccgtacgtcttagcttcttcagcgctcatgaagaagtcacggtcggtatcccgctcaattttctcaagaggctgacccgtacgatcgacgtatatttgattcagtttctgacgtgttttaataatccattctgcgtgtatcttaatatccgcagcctgtccttgaatgccgccaagcggctgatgaatcattacttcgctgtttgtcagcgcatatctcttgccaggtgcaccggctgtcagcaataacgagcccatgcttgctgccatccctacgcaaatggtagatacatccggcttgataaattgcatcgtatcgtatatacccatccctgcggtgacagaaccaccaggtgagttaatgtacaagctgatatccttctcaggatcgtcggctgccaaaaacaaaagctgtgctatgacaagattggctacatcgtcatcaatcgcactggttagaaagataatgcgatctttcagcaaacgtgaatatatatcgtaagaccgctcgcctcgattggtttgttctataaccattggcaccagactcatgagaccaacctcttttctacatgtaattagacataggccacctgtaaagcaaacccaaattcattctaacactttcctgtgacaatgtcatttttcacaagaggggtgagacatcaatttgtttacttttttagcctgatcatatttaaccatgttttctatgtatgtgcaaattgaagccatcctatgccgtcttgccgttttttatttgcatgaagtacataggtatgtaaaaagtgtacactgatcaataaaattagtgttcatccatataattacttcattttctataaaatggatgtcataatttaaaaataaggcacgcaataattcacgtgccttatcgtttattcaactgacaagttgataacagcttgtcttatttttcgtcagcttctgcaacaacttcttcagctggagcttcaaccggttcaacaactgtgctgttctcaaggagaacgtcaatcgttttacgcagttttacttcatcacgaaggctgtccagggaaccattaccctcgaggatgccacggatctcatcagcaggacgcttgtaagattcagccattttttcgagttcttgattcacttcttcatcagacacttcaatgttttccgctttacctacagcttctagcaccaggttattgcgaacacgtttggaagcatcttcttgcatttgtcctctcaggtcagcttgtgtctggccagagaagctcaggaacatttcaaggttcatcccttggttgcgaagacggttgtcgaaatcacgcatcatgttttgtacttcgctctctaccattgcagaaggaatgtccacttcagcgttctcagccactttttctacaactgcattttcttgagcagctttggcttcgtcagctttacgggattccaattgtgttttcagatcagctttgtactcttcaagtgtgtcgaattcgctaacatctttagcaaactcatcatccaatgcaggaagttgtttgcgtttgatttcgtgaattttcactttgaatatcgcttgtttgccagcaagttctgctgcatggtagctctccgggaaagtcacttctacgtctttgaagtcacctgtggacagacccacaacttgctcctcaaatccagggatgaatgtgttggatcccagttccagggaataacgctcagcttgtccaccttcgaaaggtacaccatcaacggaaccgtcgaagtcgattactgcaacgtccccgttagcagcggaaccttcgtcaattacaacgagttcagcgtgacgttgttgaagacgctcaagttcttcagtcacttcttcttcagttacttcaccttttgctacagcaacttcgattcctttgtactcaccaagagtaacttcaggtttcacagttacttttgctttgaacttgaatgtttgtcctttagcaaattgttcaacatctacgtcaggacgatcaaccgggaagatatccgtttggtcgattgcttctgtataagcttcaggaagcaaaatgtcgattgcttcttgataaaggctctctacaccaaaacgtgcttcgaaaatggaacgtggtactttacctttacggaatccaggtacgtttgcttgtttaaccactttattaaaagctttgtcgagtgctgcagttacacgatctgcatccacttcaacctcaagaaccccaaggttcttctctatcttttcccaagttgctttcattgtatactttcccctccaaaattcacatgttcacgtaggcaatcacgtacaaaataaccattttagtataaacaagattagattctttttcaaggggaatcccttgatacagtttaaggaaaacgtttccggcctcgattaaccatccaaaccggcagatacaaactgtttcatagaacgataagcctgctccagtcgaaagcgcatcgcgcctgtcacagcatacattgagcgggtattttcctcatcatgcgaaccacccagactgtctgcaacggtcatatgtagagctgctgcccatatatctgtcatggaatcattttcttccagcatcgatacataatcacgggttccatacaccgccatgacatattgtatccacagttcctgggcaaaataaaagagcgtaggttcatgaacctccgtctgatctgccactcgttccagaatctgaacgatttggagcgggaattcctctggtctaagaggcacggtgtcgatctcgacttcaacctgctcttcgcctctcgtaaacaggatcataccttgaacacctcggcgacgcaaggtttgcaacacccgaaattgaagcagagggtgaagcgacttatcttttaaccaactcgtaagtgcctcatcaatcttcggtagatcaagataggccagctgctccaaagccagcatcgtctgttcagacagcggctcctccattacggtgcgaagcatcttatctgcataaccatcatcctgttcgagcttcattcgggcatgctgccgtgccatgtcttcctcactaatctcttcttcctcttctcgttcttcaagaacggcaggcgaggtttcttcatattgaggaaacgcagcctgaagccattcgagcagagcccgccattcatcataatggcgctcttcctgtccctgacattgcagcaaaaagtgaagcaatttcatcgcttcaccataccgttcattttcaagcataactgtcaattgaatctggtaatagtccagcgtcttaggaaacagcacaatattgttgttatgctcggtttccggggtcgtggattccttaatgggagcacctcctctatatcctgaatctccagtcggaatcaacataaatagatgtatatattaaaacgattgttgatctattttctgagttctcctgatattctaacataaccttaaatataatgaaaaaaacgttactgccgccaaatatcatatacgaaaaatagtttaaaataaaatgcttgatattcctgtatgcatatgataaaatcaattttgcttgaaaaaattcatgtctcagtagctcagctggatagagcaacgcccttctaaggcgtcggtcgggggttcgaatccctcctgggacgtattaaaaagaaacttccttcgggaagtttttttgcgttctggggatccccaacggtttgtcggagcattcacttcgttagcaccacttcgcagtctcgactgcaaggagagtatccctcctgggacgtataaaaagaagcttccttcgggaagcttcttttgcgttctagggatgagaaccccaacagttcgtcggagcatccacttcgttacatgctctatgtcgctgtattggagcgcacgcatttgatcactctataagcaacacgttgaagtatcgatattctaacgaacataggacactttatttgctccaaattcagcattgtggaattctaacgaatctgagagagcttatttcgccttccggggtgttaactcacttatctgcacttcatagcctgattaacgtcgctgaggttcgttagaatttgaaaatagccgttttacccattataagaccacgtggattcgttagagttcacagggtagtcaaggcacccattgtcgattgggtgttttttcatttcattgctcaatattgacatagaatgttatgcttacccagtgggtaatgtaacaatccatacatattaacttcttaggaaacaggagattttatcaatgtcatcttcaatacagcaacactcatctatccatactgaggaagaacattcttcgacatcaaaaagattcggcctgttattagcaggcattatcgtcatcgccgctaccatgaggtcaccgatcaccgcaaccggtcccgtcgtggagatgatccgctcagatacaggtatcggccatacgatggtcgggcttctgacctcacttcctttgctcgcctttgcagcagtctctccttttgcaccacgtcttgccaagcggttaggactcgaatctgctctgctattggctgttatgatcgtaaccattggggtggcattacgcttgttgccttccgttctctccttatatgcaggaaccgcaattttggggtgcggcattgcattaagcaacgtgcttttgccaagtttgatcaaacgtgattttccattgcgggtaggtatcgtcaccggattatactctgtatccatgaatatatttggcgccatcgcctcaggtgtgagtgtgcccgtagcaggagccacatctatgggttggcgtgcttcgttaggtatgtgggccctgttgtccatattggcgcttctcttgtggctcccccagatcgccgcaggacgtcagcgaatgttattcatagccacacagagtgaagggacacctgtacgtctacggacctcttccctggcctggttcattactttatttatgggtctgcaatctctaatattctatacaacgattacctggcttcccgaaattcttgctgagcaaggattcagccccacctcagcagggtggatgctatccctaatgcagatggttagtgtaccggctacctttatcgttccaatcctcgccggccgaacgcgagatcagcgtgttctaaccgcgataacgtgctcttctttaattgtcgggtatgctttattgttaagtggtatcgcttcgctcgttaccatcggtgtcacgttggcaggaataggcgctggagcttcatttggaatggtaacgatgttcttcgtccttcgcacaaaagatgccagacaagctgccagcctgtccggtatggcccagtccttcggatatatgctagcggcagttggacctttactgttcggtatgcttcatgactggacaaaaggatggaccctgccgttgctaatacaggtcattctggccatcgctttgttaatcgcagggattcaagccagcaaaaataggatgatcggttagtcatataattcatttataaaaaaaaacaaaacggcctccatcctgggaatcaggatggaggccgtttatgcatagaacaattccttcattaattgaatccattttaatcaatttcaatgaggaatgaacttacttcacttttaccttaatcgtgtctgtgctggtaacaccgcctgcgttaattaactctgcccgatacgtatacgtgcccgatgttttcccggacagtgtagtcacagcactttgtgcataaggtgtagccgaacggagttcttgcgtatcgatcaacttatcattttcatagagacgatactctgtagcgttggtcccccaccacaggttcatggtcaccttataattgccatcgccatcccagttatcgtgagaaagaactgctttgcctggcgttgcgttggtaacccgaacagtcaacgtctgactacgcgttgttcccttgtcgttagtcagctcagccacgtacgtatacgtgccattggctttgcccgtgatcttcgtctgagcaaactgcgcccaaggtgcgttgtaagtcagcttctgcgtatcaaccaaaaccccgtcctcatataacttgtagctagttgcgttctcgccccaccacaggttcattgtaacgatatacgcgccctctggtaagccgttgcctacccagttattgtgagacaatacaggcgtacctggggccttggttgccggagtttcaggttcggtctccacggcttccaatttcagtgccgtattggttgtgcccgaaagcccctgttggtcttttacggtaagttcaacagcatactcacccgctacaattccctccaaaggaaggctgaagctgccatcagcttgtacttcaaagactccttctttataaaccgatccatcctcttttttcacaacatacgttgcttccagggaagctgccggatcaaacgtgatgtcccatccgctggcaagcgcaggagctacacggaagtacaaatcttccacgctaccattaaggacagcagactcatcctctttgaactccaacgcttctggtgcagttacagccggagctgtctttttcaccaaaaatggcgaagtgtcttccttataggttttgccgtccgtaccaatagtagtgatgtctacggtatataaaccatccggaatctcagtcacttcatcggttgtgtaatctgcatatgagccgtcccaagcaaggttgtatcttgcattggcattgaagttaaaatagttaccaaagatggagccgatataaccatcttgataatatccaccttccggattaagaccatcatagatctcaatcagggcaaatgtcatcggattatagaattccatcgcaacattcagcgtatccaacgtaccatcagccttcaatggatagtggaatggatttttctcagtcccttttacggtttcaatatacttaactccactcaacgtaacgttgaaatgagcaacatatggaacagtaaaagtattggttccgtttgagaactcaatgtatccttgtgcttctgtagtcgcagtaaccccacgcggaacggtgattgttactgcaagttcttcctcaccattcaatgtaaaggaactcttgtctacagcaacggatacaccagccacattacgagttggattcacatttacggtgtaatccccgccactaccattcagcgcttcaactttaaccgttttggtaatcgtcttttcatctgtgctcaggaaattaccgtagttgatacttccggtgatattctccttttcaacaacagatccactttctgtgtattgagttacatcaagcactttgacaaaagccgcaggatcaatggtattaacagcctgaatacggccagcaccttgatcaaatacatcaaacttggttgtatccagcaccttactattgttcatcagtgcaactttgatatcaaatggtgtccattccggatgcttctcgatcagaagcgcaatcaaacctgctacatgaggtgtagccatacttgtacctgatttacgatcataagcttgtgcgtaatctgcgtctggctcatccttgccgtaggcaggaatcgtagacaaaatgcttgtacctggtgcaacaatatccggtttgatgtccagtgttacctttgcaggcccacgtgaactggatgaactcatttcatcgcccggagtttgggaacgttcaaaatcactaaagctcacttcaacggcttgccctgcgtccagctcagccttgatcacatctccatcttccttggacatgctcagtgttggaataagttcaaagttatctcccagacttacaccaattgggccaggaatgttgttatatacaataacagtcacggctccggccgctttagcattggcgattttctctacaaatgcgatttcaccacgctgtattaatgccactttacctgtaaaatctttaccttcaaaatcagttggcttacccagtgctgcaaattccagctcatatttccctgtcaaaacagtttcagggtctgccgacaggctccatcccatcagatccagacggtaaaccgactctgtaatagccagtggagcttcagtcggagcaattacagactcttcttccacaggagcagcttcaggagaagcttcaacgggtgcagaaggtgatgcagatggagtattttcttccgttgtagcttcttctacattcagatcttcagcttcgttagaaactgtgtcctccacagccgctgcactttcctcatcagcagttgcaggtacaccttgctctgaaacttctggtgcttctgttccaggtgccgtacccagttcaggagattgttcaacctctggcaccggttgttgttcaggttgtgcctcttcgccttcctcaccaatccagaagtgagtatcggctgtaatcagctggctaggtcctgtagagttacctaccgtaatggccattgcagacgcacccggagaaccgagtgtataacggttaggtccactgttaccacttgctacaaccgctgtcacaccagacaacatcgcattgttcagggcaaccgaagtgatataacttgggtcgttggcggcgttacctaacgagagattaattacgtccatgccatcttgaacagaacgatcaattccgccgagtacccatgaggtttgaccactaccatacggtccaagtacacggtaagcatagatatctgcttcaggagccacaccaacaataccgtagtcccctgcttcgcgagcagcaacggtacccgctacgtgcgtaccgtgggaggtataataggcgcttccagtatcattgaactcaggttcacccgaagctttccattcttgatatgtagcttcatacggatcattgtcgtttccaacaaagtcccatccgcctttgtaagcttcctgcaagttaggatgttcatagtcaatccctgtatcgatgacacccactttgatgccatttcctttgtaacccagatcccatacttcaggtgcaccaataaaaggcgctgtgtctttcatgtatgggttcacttcatctgtctctggcgctattgcaacttcaaggtcaggatatacgctgaccacaccaggtatttgaagcaattgtcccacctggtttcctttaagctcaatcgctacaccattcagggcatatgcatattcttccaatacttcatgtttgattttcttctgagtgaggctatgtacaaatgactgttgttgttgctcaacttgagtcacagcctttgtttccatagaggaggtaaaagattttccggagagggttgattcaccttgcgctactgcaacaggtttattggaaagctcaacgatcactcgggtgttctcgccacccagaccttccaagcttttatccaaaaatggatctgcggcaagttttgcttcccgtcctgcaagaatctctctccattgtttggcttcggctgtactgggtaagttgtcaagctgaataactgaatctgtgggagcggctccagccgcggggagaataatggaaaagaccatcagaacacttaataacgtggatatcaatcgtttactcaaggctttgcccctccttttaaatgtgaatacgtcaccaaatgatgggttcctgctgtttgtgcgtactgcaatacacactccaatttcaccgcctatctgcaagaagattgacccttggtaaattattctatcaaaataccacattttccttctaaataattacaaatatgatatagaaattacttatatgggtcttcagtatgataaaaatatccatttgtaattatttgtcgtttgaatatttcatttttaaaataatgcatcaaaaaaaaagaccaagatcctctttatccgaaagagattcctggtatataggggaagagtggttagtgtacaaaggatcgtaatagttcgtctaacatcgataaaaattgctacatatcgcgaaatttcactttattctggcttcacggcttcaatacgcaggcgcttgtaatcggcatacatcgcatcttctttccaaaggtgaggcatcacgatttgactggtttcatggcatatttgttgtatctcttcatgactgagacctgcaaaatagtcgcctccaaaatgagccaaccagcctactataccctgctcaccatctgccagtctggtaggacggtcatagtgataggcatgacgcaccataaatccactttgctctaaaatatggctatattctccgatcgaaggaaaataccaaggattgcgttccgatgcacgaatgcccgtgtttcgctccataacctgctctaatgcattcacaatggtctgcacgttccctttaccaccaaattctgctacaaaacgccctccgggcttcaaagatttccatatactatccactactaatcgcgggcttcgcatccagtgcagggctgcattggagaagacggcatcatatagtctattcgtctcaaactgatgaccgtctccttccacgaactcaagttcagggaatttcttcctcgcacggcgaatcatgtccgtcgatgcatccataccaatagcttcagcttcggccagagaaatttcatgcgtcaaatcccccgtcccgcaacccagatcaagaatgtattcccctttttggggttgaagccaagagatcagatttttgccgtatccggacacaaaagccagtttgttgtcatactcatctgcttgccattgatttaatgatttcatggataccaccgtcgctttcgttattgatatcctcattgtgacacagaattgtttattctttaaatatataaattctatattgtttataggtataaccaatagaacacttcctctgaacgcaaaaaacttcccgaaggaagtttctttttaatacgtcccaggagggatgctctccttccagtcgagactgcgaagtagcgctaacgaagcgaatgctccgacgaaccattggggttctcttcccctgaacgcaaaaaaaacttcccgaaggaagttttcttttaatacgtcccaggagggattcgaacccccgaccgacgccttagaagggcgttgctctatccagctgagctactgagacaaatatgtataataaattttcggcgcggttcttattatactctgatttctatatttttcaatagttttataaaaaaattaataattatacttaaatgcgggctcaaacatgtacttttcggtgttattctcatactccagcccctttgagaatatgatagcttgaaccaggttatattgaggagattgggacatttagagtaagattaacatcagacattttcaatgtcagaattgctgggtaatcttttgcatacatacatttcaatgatccattgaaggagagaatcgtcatgagacagcttttatcagccctatcctatttcagtattttctttgccccgttcctgtttccgatcattatatggattgttgccaaggatgattacattgagggacatgcaaaacgcgccttattctcacatgtattcccctttctcgctgccattccgttattttatttcttcgtgactgcgcatagtctgggttccgccgttgggtttgtcattctattctttgtgatttacggattaagctttgtgtacaatgtggttaaagggattcaagtgttgcgcgagtatgcttgatcacatctccacctgatctgaccatcgcataacaaaacccgccgttcaacaacggcgggtttttccagttacagatacagtcagagcaaccagcaacagcaacaggtcacatctacatatagctcaacatcgaactctatcccactatcgccacatgtgttgctggagcgttacctgttaagcctgcccgatcagataacgctgaagtgttggaccaagcaaaccaaaggaaaacaactcactttgaaaccgagctttatcttcttctactgtcataccttcgctgttctcaaatgcggtatctgtcgcctcttcaaacgcagtatgcatattattgttataccagtcgatcgccgaatcggagtgattgcgtacaatccgaaccacttccagcgaatttccgggctgtgttgaagccacgtatacaagtaacgacggatctccggcatttccaggctgcacttcaacctctgcacaagacaatccatccacctcggttaatctgcgtattttggcatcttgaatggcatacattcgtcatcgcgctccttttcctttgtgcttatcatgtactttgttcaatctggtatcgtgtctctggtgtgcccaatcggtaaatctctcgatacacctgttgtaataccgtttcataagctcggtttacggactcctccggtgtatctggccatgggaataccatgccaggaaaggcctcttcctccttttcctgcatgaggctcagcagtcccagtaattgctccgcttcctgcggcgttgcctgaatgatccattcatatgatgttaccgacggatccggaataacggagcggcccatgacagacacataatacttcatactgtccattgcatgttctctccttcacaggcatgttgaggccgttgtccctagaactagtttccgaagaggacagacattttatgcctgctttcggcatatatttgttacgacctctgacgaaaagacaacatttgctggttgccagtaactaagcagccatacggatgaatgactcgaccaagaaaggatgaacaaaccatgtgcggtattaccggcttcatacagtggaatcgggatttgacccaggaatcagagctgctggtccgtatgacggatagcttgtcgaaccgggggcccgacgcttcaggtacatggatctccaatccttgtgcctttggacatcggcgtcttagtgtaatggaccccgagaacggcgcacagcccatgcatgcgttacagggagatacctcctataccgtcgtgtataacggagaactatacaatgcacccgagttgaaaaaggaattgctccagcgggggcatcagttccgcacgcaatgtgatacggaagtgttgctcgcctcttatattgagtggggaccggcatgtgttgaccggtttaacggtatttttgcttttgccatatgggatgggggacgcgaacaagtttttatcgcaagagatcgccttggcgtgaaacctctgttctacagtaataacaaagacactctcgtatttggttcagagcccaaagctctgcttattcacccagatgtggaagccgctgttggcccggaaggattggccgaagtgtttatcgtagggcctgcacggacaccaggacacggcgtatactcttcactaagcgaactcaagcctgcgcacgcgctgatctataaccgaaacggtatccgaacctatgcctactggaaactggaaagccagaaccacgaacataacctggaagagacggcagcagaggtacgctctctcttgcaagatacactggagcgccagttggcttcggatgttccagtatgctctcttttatcaggaggactggactccagcgccttgtctgcattagccgttgattattacaagcgaaccgggcaaggccaaatcagtacgtattctgtcgattatgtggataacgccaagcatttccaggcgcattcctttcagccgggtgcagatggaccctggattaagcgaatggtggatgaactcaagaccgaccatcactggattgaaattgagaacggagaactgattcatgcactgacacaggccatgttagtcagggatctgccaggtatggcagatgtagactcctcgctctatttgttctgtaaagaaatcaaaaaaggggccaccgttgccatttcaggcgaagcagcggatgaagtgtttggcggttacccctggttccatcgagaagatatgctgaactccggtacgtttccgtggtctgtagcacctgatatgcgagcagcgttgttatccccggatattcgggaatggattcggccactcgattatttggcagaccgctattcggatgcagtggctgaagtgcctctgttggatggggaaacaggtaaagctgcacaaatgcgggtgatgtcctacctgaacattacacgtttcatgcctacacttctggatcgcaaagaccggatgagcatgggggcaggactggaagtgcgggtaccttactgtgaccatcgtctgatccagtatgtgtttaacatcccttgggaaatgaaaataacgggcggacgggaaaaaggtattctgcgtaaagcactcgaaggtgtcctgcctgacgatgtgttatatcgcaaaaagagtccgtatccgaaaacacataatccgcaatatctggccgcggtcaaacagcaggtacttgatatcctggatgatcccacttcgccgattttgcctttgatcgacaaaactcagatccggaatcttgcgtcttcaccagatgcagcttccaatctcccctggtttggacagttaatgtcgggtccccagttatttgcttatctgactcagatcaatacctggttgcggacatataaagtcgctattcgttaagatcaagttatgcattgattcagcatgatgaattatttaagggtgcccaaacagtaactactgtgtttggacacccttttattacttttttataagaatctctgtacgtatgcgctcgttcttcatccacattccactcagttcgatttattgcactttgaaacgactgacggtctgttgcaactgttctgccatcaaggagagatcattggctgcggaagcaatctcctgcatcgcagacaactgctcctctgaagatgcactcactccttctgttccagcggcccccgtttcggtcacttccatgattgttttcatagacctattaatctgttctacccctgttgacatttgctcaattgaagcagagacttcctgtgtttgccccgctacgcccccaaccgcctcacgaatttcatcaaatgtggctcccgcctggtgaacaagtgtaatcccctcttgaacctctgcggatacaaccaccatagattcagcagcatttcgcattcccttctcaatcgatgccaccaatggaacaatttgattagcagaaagcgcagactgctcagacagcttccgaacctctgtagcaacaacctgaaaccctcttccctgttcgccagctcgtgcagcctcaatagcagcattaagggataggagattcgtctgtgctgatatttccgagatgctgtccaccattttcacaatatcctgagagtgtctgctcagttcctggatcacgaccgacagattcgacaccgtctcttgtatagaattcatttgacctatcgcagactgaactgactcgctacccgatattgtttttacggagactttggtagcttcttcagacatatggagtgtgttctccgtaacttgttgaaagcctgtcgttaactcattcatcgtctggaatccatcactcgccattcgaacctgtgtatccatacctgttgcaatctcacccattgtgatggccacttgctctgtggcggttgctgtctgttcggtgcttgccgtcaactcctctgaagaggcagctacccgttctgcactgtctcctacctgatgaatgagtgtacgcaaatttgcagacatgatgttaaaggcttgggcgagatcaccaatctcatccttgttacggaccacaataggctcaccagtcagatctccgtctgcaatccggctcgcggattgggcaatagcagcaacaggcaaggatatcattctgccaatgacatacgccacaagtgccccgattagaagagaaaccactccaataattgcaatccacctaaggacctgcacaatctgaagattagcctccacaacgcctgagttcatggcatcttgttgatgcgtttccataccttccacaatgccttcaaattcagagatcagacttggggctgtatccttcagtaatcttgagatttcactgttatttccctgtcttgtcaatgtcataatctgctgcgcaagttcataatattggctcatcgcttcatccgatcgtgaaaggtaatctttcatctttgaacttgaaactgatgattttaattcttcatttaatgctatgtaatcttcataagctttattaaatgcctgttcgttctccgcactgtcttccagaatataatttctcaaagcaatctgctgtgatttaagatcaatcgacatatttttaatgagtaatagtttgcttgttctatcattaattaattctgtatacgttttctcaacggctataaactgcgtatatgttataaccgttatagccaccaataataacagcacagatgagaaacccataagtaatttacggctaattgagatttttttcatgtgtactcccccgaaagttcagataacgtgcacgatacttcctacctccaccctcctttcaattgaattgagactttagacccaattaaaaatataattcgcgattatatgtacaaatactattcataacagggtcttttttcctattcatactaacccataaaatataaaatttgaatcataaacttaaaaatattatttttcaaaattgtcaagtcccttttaataaagaacacaaacactaactctagtccggtaaaacaaaaaaacaccttccagaaggcaagtccaaaccaaaggtctgatcctgcctatactaaaagatgcgtttgaagttacgctgatatgcggtttagaaacggataaacctattaaagttccccagtggaatagctaaatatgaaatgccggtcaacgaatcaataccggattacgttcaagcagcccgctgccaaacgtttctctgaacggggaatcctccatatggatataaccgatgtaacagccacattttttcatgcgacaaggccgatcctcagacaaagcctgcaaaccatcgcgatatagatgcccaataattcgtcgatccttgtaacaccgcttcacatgcccggacccttgtacataaaatacttccgaaccggcagcacatcgtttgcccaagctctcataatcctgcagattaccttcaaaaagcggatcaagcccacgtaaaaactgaatctcttccggcgtgtaatacttgggccgatctttgaaggcattaacccacatatacacatcatccggcaaagcctgtctcatggactcgattgcggggaaagcactacggagtccgacagtaccgacactaaaagcaagtcccatctgacgcaaggtcagacattgtttaacaaaagaagcctcttttgtctcacgaggatgatacgtcgcccaaaaggccgctttattcgcatccaactccctcgcccaatccagtttgacggacaggttggtttgaattgcaaccttatccacatgtggcatatgtgacagctcaaccatcgcttcccggtaccaccgacgcaccaaagcttcaccatagggattgaagaaaatcgaaaattgatgcccagcactctcttgctccctgacccaattcacaaattgacgcaattgttgttcatccacttccaacgtctctttggaatccacggttttgctaaaagggcagtatggacagtcgtaattacaggaagacaacttcccccgataatacaaagtcgctctcatgagaaaacaaacccttccatctgttcacgaatttcggcagatataagccaatctccaatcgcatcggagtaacctagtccttcttctgtcagacgcagcacctgcttgtcctcatcactctccaactccgccatgccctctgtcaacagttcagccaaccagatatagtcggacatcacatcggtaccaaagcgctgttggtagtcagacagtgtcaatccctcgcgatgcagcaaggctttcagaataaagcgccgtctctgttcctcacggcttaacacgatgccataatccgccacatcgtagcgctcagttgccacataatcggcaatgatgctctgtgtggccttgtaactcacgccatacttcgaagcataatgtacttcactcgtataagagcgtgcgccacaccccagaccaaccatgccctcctcctgacagctataaggcagaagcactttggaggacgactgttctttggcaaatctgcgcatcgaatattgaacataacctttactttttaaagtctcacgtgcagctttatacagttccatccgtatgtccggtccctgacggcgaatatcatcaggcttcacgattgtattttcccgtgtatacaagggatagataaagatttcgcccggttcgtaggccagaactctttccaatgaatagatccacgattccaccgtttgacccggcaaaccatagatcagatccagattcaacaatgggaaatcataccgagtaagcttctcaagcgctcgttcaacttcctgcggtttttgtggacgatagatggcagatgcttcagcttcaataaaactctggatgcccatactgacacgatccacacttcgttccttcatgatggccagcttggcttccgtaacggtatccggcgacgtttccaccgaaatcgatgcttgcgcagggtccagccccatcacatgttcagcaatatcaaacagacgattcaactgaacctcatttaataatgtaggcgttcccccaccaatcgcgaaccgcgaatacggtcttcgagatgtaatgggtgcccactgcttcgcctgacgttccagcgcatctacatagcgttcatgcgtatcttcccgtcgatccggcagtgtgaacagattacagaatccgcaacgagcagcacaaaagggaatatgcatatataaaaaatacgtatcggtattctctcgttcccacagtggccctaacggcagtggtgggtcaagctcccgataggcggtcttgtgtgggtacgagtataagtaagaacgataagggaatgccagtacttcactgagacttgtagctatattggatccggactgtgtggaatggcctgttgttgtatgttgtatatgtttctccatcggtttcctcctgtctccggttgttgtcctcataagatcaatacattctatactaaaaattcacggtaaggcaccgtccagacgacatcatgtgcaagccggtgtccttgatacccatcttcaccgtaagctgtaccatgatcggaaaaagccaggcaatacgtagggcgggcgcgttttcgcatcgcctcgaacaatggcccaagagcctcgtctacatatcgaagtgcagcccgttgagtctccaccgagtcttccttggctccttctacaaagtaacgattcggaccatgaatggcagacacattcaaaaacataaatatcttttcatccggcgctgtctgttcaagcaactttaaggcatgctgtacctgatgctctgttgatttggggttggttaccccaaagttcattctccagtagctctgttggaaataaccgggcaatactttcgcaagcgggttttttttcgtaaaaaagatgacgccgccaatacagatggtacggtaaccttcagctgcgaacccggatacgatatccggtgtatcaaacagccaggtgtgcggatgtgttttgagaccggtattccgggaatgaaatagccttacatgagatgccttatccgtattagcaggggtcggcataaaaccaccaaaaaaagcatggtgcgccgcatatgtaaaactgcccggagtatgacgcttctcccacggacccgaaccacacagattagggcaattctcctcttccagcttggctacgtcatatcgtaacgtatccagcgtaatcattaacagatcatgggagcccacaatggtgttcatatcaggcatgttgaataggctcctttcgtaaaagttccatttcccactcataggttcccaggccatgatgctcgaccctgtataacaaatctccaaacggattcacatccagcacataggcacgcggattcgaaccactagtaagcatcacatcaatcccggctgaccacgagttgggaaatgcagacatggctgcttgcgctgccaaccgtaccagcgacatccgctgttcatccaggcctgcttcagcaggcagcatacgctcattgcgcagatgcagattggtaatcggggtacggctcagccgcataatcgcgtgacctgcctgtccacctgcaaccagttggcgaatatcataggcccgctgatcaagcgtggcttttggcatccatcgttcaatctgtgcaccttctgcacataaccagttcatcagcgtagcaatctcttcactgcgggtatacttgcgtagacgtccttcattgaagaaaatcgtcttgccctgtctctgttccatccccatcgttgttacagcgatttcatcacccgttcgaggattgacttgataggcaacaactcctgaagcccctgagccgcacgcaagcttcacaaacacacgatgcatctcggcagacttcattgagctacgcaggtccatataattacggattggccgcgaaaattgcagcgccggaggtacatcaactccatgtgaagatagatgttgctgacaagttctcttgtcaaacatcaattggatatcggcgggatcattcaagaatcggacttcaggccatatttcccgagactcacggccgattcgatccagacatgctttccagccacgaaaccactgggcgggagcgtatattcttccccactcctgttccagcgcaagtgcctgttctgcggaaaatgcttctgtacccattccacccgttaatgttgacgtatcattcatagccccaaggaacagtagttcacgctccacttcccactcctcaccaggagcatcaatccgaatcaggggtacaggcagattgaaatctactgtatcagcgatggttcgtccgtgtctccaattctgcagcaattgagcatatggcagtacaatcgcaggtttcaaacccaatctatgcctagcctcttgcagcccttgtgttcgtcggttatcagggtttccgatcaataaaaagggctgatcttgcgttagatcaggtacatctattggttgatgcaaactctcattcatttcctttacacctgacatcgactattccgttaacgatggatagcgccagtcatcctcatcactctgttgctggtcgctaacgtctacagatatacccgatcggttccatcgactgatcatttcattggtcatgtaatggtaacttagatcaagatgtttcagtttcttgatcttgtcactggcaagcaacgcctcagccccttcatcggacaacgttccttgcgatagatccagtacttcaagttgatccagaataggtgcttcagctgctactttggcaatctcatcctgaatttcactgtctttcagacccaagtaaaccagctttggaaacaatcctttttctagcaaaggaagcacatcttcaagtgatccattgaaaccataattatccacacccaggtacagttccagtttacgcaattcaggcaacttggcatgggtgattgaagataacacttctttcgggagaccaccacaaataataatcaattcttcaagcttggcatgctggagtggttccagactgaggccgctactgcccattacagagaatgattttaattctggaaaggcacctaacagtggtgtgagatttgtctggataatccacgatacttcacattcttcgaatcccatatctccaataaacagtttcttcaatgacggaaagcttggagcagactcgacaagcgtacctatgaactcgtcaggcgaattttcataagcctgtccccaatctccgatgaccagactttccaatgagctagcctccggtttagctgccagttccttaattaacttttccatacgaatgccgtcctcataatcatcgtaagatacaacaagcttcacttcttgcatgagtagatccctccgtttaaggttcatatgtgattcgttagtttgaatgttaacccataccacacaaggcttgcaacttcttccaactccagtcccaatgagattcccaatcgtgcaatgtaaaccatttctcatgtaggtacaagaacgtacgttctgatatgtagtcgcagaaatagctatctttaattaggtatatggatggatcttcaccgaacccgatcaaacacttcatttcatagaaaaagcgttaatggcggatgaagcatcccatcggaatgcttctgtccttccattaacgctttgatgttcacatatcatgaagttaaatcaagatgtttcatttagtcttagccttcaagtctggatacaagcgctctcagcgcatgaccacggtgactaatcgcttgcttttgctcaagcgtcagctctgccatcgtcatctcgtattcaggtacatagaagagtgggtcatatccaaaaccgccagcacctgcagcttgagccgtaatccagccttccgcagtgccttctgattcatacttatcacctgttgtcggatcgtacaggaccagcgcacaaacgaaacgagccggacttagtagcggctgctcggtgtcctcaccggatttcaacgattccagcgtctccagcaacttcgcattattctgtgcatccgttgctccttcgcctgcatatctcgctgaatatactcccggctcaccatccaacaggtctacacataaacctgaatcatctgccagaacgggcaaaccaagcgcatcaccaaccgctttggctttcttccaggcattctccgcaaacgttacgccatcttctacgacatccggcagctccggatagtcaaacatgctcttaacctctttgccaagcggtgcgaaagcatgagcgaattcacggactttacctgcattgcgggttgcaacaatgaggattgggctgtccaaactcatcttaggcttcccctaatccacgcgcgccgatcttgagcgcaatcggtccaagcacttctttttgacgctcgatcatttccagaattccctgttcgcccagttccaacatggcgttcagctcacggcgatcaaatggtgcttcctcacctgttccctgaagctcgacgtatttaccgccacctgtcatcaccagattcatgtctaccttggctttggaatcttcatcatagttcagatccagtacaggctgttcacccacaacacccacacttactgcggcaatgaaatccgtaatcgggaacacttgcagtttgtgctgttgggagatcttgttcacggcaagcgccagcgctacaaacgcaccggttatggacgttgtgcgtgtgcctccgtcagcttgaataacatcacagtccaaggtaatcgtacgctcaccaagagcctgcagattaactaccgagcgcagtgcccgaccaatcagacgctggatttccatggtgcgtccagttaatttgccacgattggcttcacgttggttccgggtatgtgttgcacgtggcaacatggaatattcagctgttacccagcctttaccctgccctttcataaagggaggtacacgttcctctactgtagctgtacagatcacctttgtatctccaacttcaatcagtacagagccctcggcgtatttattcgtgttcactgttaaattcagcgggcgcagctgttcgctggttcgtccgtttgatctcatattttctgcctcctacgacttaagcatcctgtaatgttgaacttattcacacttttacgaatcccttatattttaccaaagagttcggttaaaagcatccttaagcattccttggtcattaaatcggaatttcgttgatatattcaggcttggaaaccggcgcactgtaatccctgttgtcgtcacccatgaccgttttttggccgttccactcgatctgtactttggcatccttgctggctgtgttctccgcagtggttaatacgacagattgtaacagctcgcttggcacgatatccccttcggcaaacatatcatctttcaaggcaaccgtgaccgtgccatcctctgccgttttgaccgattgcagctccgttccgcctgtcatgacctcttccagttctccacctttgttaggtcctttgatgagttcgttcaatgctgcctgcacccgatcttcaccaggtgtaaccaaacgtgtcaccggaacataatattggatgcctgctggtgaagcagcggagaaatagaccgtgaccgggctgctattcgtcacaaacgtatcacccagatccagattgattcccacagcccgattcagcggttcaggcagcggcgtgctgtttaccggcatttgcgttaactttttgccatccacccagatctgcacattctccacatcaggtgttcccgtcaatgtccacgtgacagcttctagcattttccgttcttcctttgcatcatacttggcaaaattacccgagaactcaacaaccgccagcttgtcatccgcgtgaatcgttacattctgcacaaccgttccctgtgggagaacgccttggaatccttcaggcagcatacccgcataggccccacctgtgacaagtgtatccagtgctgtctttggactgcttgcgtctgtcccagaaggaagtgtcagggataccggagcgagcagcccctgctggtcttgcagatataccgtcgttaacgggagcattgcgagtgctccattcccttcggccgcttgaatcatagctgcttcctggatgggcggtggtggatcaacagcttcggaagactgtgctccaaacatgccgcaacctgacaataccataggaatactcagcagcgctgctgccgataccgtacgcaaagaatggatctttctcatgatcacgttccccctcatcatttttacagtttgtactaccatgtatacgagcctttgtccaaaaaataactaaaagatataagaaaaatgtctatcaacgcactttcacggaaggcagaccgtttttagctgaaatttttcatgtgttaatcgaattgttcaacttcactgaaacttataattttattatcttaaagaaacgtaaaccaggttaataacgtattaggaagcaagagtagggacattgctaacttcagaggaggaatcgcccatggaacatcctgagcaagaaaaaatcccttacagcctgaatagccgcaaggtggcggaggcaacaagggaatggctgcataagcggggcgtcacgatccctgagatcgcagagctggtcatgttattgcaacaaaaatattatccaggtcttacgatggaagaatgtatcgaaaatgtggagatggttctccgtaaacgtgaggtacagaacgctgttttgaccggaattcagcttgatattctggcagaacaggggcagctcatatctcctttgcaggagatgattgagaacgatgaaggattgtatggcgtggatgagattttggcattctccatcgtcaatgtatatggcagcattggatttacgaattatggttatgtggacaagctgaaaccaggggtgcttgaacgactgaatgacaagagcctgggccctgtccacacgttcttcgatgatattgtcggtgcgattgcatcagcagcgagcagtcggatcgcccatcgcaaacaatccgagcttgaagaagcactgggagaaaaacctgttagtgatgacgccgtataatgtgcgtaactcgtttcatacctgaagctatgtggaacattggacatgtgtatggatgcttcgtgaaataactgttcaataaaataactgttcatggaaaaagcggccagatggccgcttttttgcatgtgtaagatactttttgatcatccatatgttattatttcagatgtttaggtcgtaccgttcccaccaaaccaaaaccttcaacccaattctgctcggaaggtgaaccagatgttacccgtttcggtccaatcgtgatttccgggcctttacgttctctcaacatgccacgcaaaaccgtgataccgagaatgctgagtccggtaaatacatatatcatccgcatgatgatgttgccagaatccgttccggtaaccatgccgtgaaccagcagaccaatgaacaccggataggacaacatgtggaacatgaaccaccatttacggcccagcttgttccgcagatcactggataacaggacaatcactaatccgtagaaggctaacgttcccagaccactgccgatcggatgtacggaggcggtaaaaggaatcagaagttctccccaggtaaatgggctgtaatgatcaatatataacgttaatgcgtgcacgagtccaagtccgaaggcgagccaggtcgttcgggtatgccatttgaacatggctgcttttggtttgcctttggccataggcatcccttgcgcaatacccagaaacacaccggcaaagagcagcacataagcagcaattccactaattcgaatgatattccacgttggcaggtaatctacaatccattgtgccataaccggctcccccatatctgttagacttgtcctcgtttataatagactgaagcgatgatccggatcaaaaccgggccagtgctcagcaagcgtatccgtattccctctaaaataattactcccatcccgtgtcatccacaggacgtcatgccgatcgtaatgtcggtttaaccagcccacggcttcggcactccccagaatgcataccgtcttggcaatgatctcgcattgcgaagcatgctgtcccagaacggtacactgcaatacgtccgtatctgccggctccatcgtccgtgggtcaatgaggtggtgtgcaaagcttccatccgtattctgccattgtctgcgggaaatacccgaagtggcaacagctcctcgctgtaaacggatcgctcccgacatagcaccctgattctgcaaaggatctgctacttgcaaggtccattgggaatggtctggtgaaccccatacttgaatatctccacccgcgttaatcaaccccgctggaatacgcaatgttcgctgcaaccagtctgcgatacgctctactgcccagcccttaacaatgcctcctaggtccaactcagctccggggtccagatgaaccatccggctaccttcccgctgaatccagctcggacggctgtggtcatatcgatcttccatccagcctgatgattcaggtgttctcgttcgcaatattcgttcaattaatggacgttgcaattgtcgttgctgcaccttctcgaagcttagatcatatcccgaagcccgaagagcctgggagatacccggttgaaaaatcccttcggtcaggccaatatatccataggccaaactcaaaacttcatccatcgcagcggagatgggcatccatccggttgaagcattcaaacgattcagctcactgtctgccacaaatcggctgaagcgcagctcctgcgtctcaaaccaattcttcaccacggtagctgcatgttcagcttcttcccgcccagcggacagttgcacttcaacatccgtgttcatcgcacggaattgaaatcggagcggacgagcaacttgctccgttcggctcatgatgcacctgtacgtgactgatagttgccactgctgtatccggagtctgtaccctggttattttgcccaatacgctgagaatctgaataattcccctcgttactcgagctctgatctggccgagctgcttgtgtgctatcggatgttccattatattgactatcattattgtcattgtcctgcgtgttccagttgttgctgtccgttgtactgttgatccattcatccatcacatcatcatgcgtatccacttggcttgaagcagtaacacttgtatctgtgccatttgctgctgcataggccacatcaaaggcatccgaagttcttacatattgaaaaagtgcagccacagtcaacgttgctgccgctgaagcttgccattttctccattgattccgttttcttctggtcatcgctcttccctactttctttagggtgtgtctcaagacatgccctagcgaagttcatagatgtatcataggcgcgctggcttaaaaatagatgaatgaaccgttaagagaggctaaaaaggcccagaacaggtgaatttcctgtcccgagcctctatataagatcgtattatcatttcatatcgatatcatcattccgtttagatttgaaaatacgtgccatccggttgctgctcttgcttcactagttcgcgtcgaattaactcctgcaaatgggctaacgtctcactcatggcaaaccgcagttgatgggtacccagccgattgccaaacatgtgcacacagatgtcatacgcattcgccggtgactcctgaattcgctccgtcatcttctgaagacgttcctcgtgatgagcgagcaattgaactgtccgttcgttgaactgggcaaaaggattccgatgccccggatacgcctgcttgacatttagccccccgagacgttgcaatccttccatataagacaataatggctgagggtcactgccgggttgcagactaatattcggtgaaatctgtggcaaaactgcatctccgcacagaatctccatggactccggcgcataaaaggataaatggcctggggcatgtccccccgtctccacagcaacccaacgtttcccgcccatattaagccactcgccatcttcaatgggtgtgacattcggaagtggagtgatctgcgaagtaaatgccttcatatgttcatgtatctgctcagtcttgtcttccggcattccgtggcttccataataatcaggtaataatgtattaatacgagaatcaggtccccacatatagtcggcctcttggcgggagcgtgtggacattcgaacgggtgcccccgtcatctgttgcatccaacccgacaacccaagatgatcggggtgatggtgggtgagtacaatttgacgaatatcgctaaaggtcaggccgagatctgccagcgcttcactccactcctgttctgtttccgaattacgcggtcccggatctataatagttatcttcccatccgattctgataacacataactgttcacccatcgtaagggaaacgacatgctgatcttaacccggtgtataccctctgtcatgggcatctcttctgtgcgcttcatgttatctcccttccagactgtctctgttcactccacaggacgatgaccaacaaaaatcatgcgcggagaagtctgctcgtcatatttctcttcgtcatagccgccatgtacctgatctacatgaagttcagctttacttaacagctcactcagttgatcctttgtatacaacttcacacgttcctgatatacccgcggttcatgtccggatgcagtatccgtaatacgaatttccttttgcacaaatccatcctcaatcttgcggaactcctcaattcgctgtccttcatcctctcggacggagtgcggtaccagatgccgagtcacataagccgtattcataaaatcaataatatagctgccacccgggcgaagcatgcgatgaatggcacgtaatactttcagttgttctccgtcctccaggaaataaccaaacgatgtgaacagattaactacagcgtcgaagccacctttcagcggcagttcacgcatgtccgcatgacaccacgatactcggtgttcggtgtccattaggcgcgcttcatgtagaagcacatcggacagatcaactccggtcactcgcaatcctgcatcagcaagtgccatggagtgacgtcccataccgcagcatagatccaatacttcagcattgggctcaagcttcaaccaattgatcattttatgtacttcctgatgggcaccctgcacatcccggtgcttgtatacgagcagataatcttctccaaaactctttttataccattccgtcatccattctcgccctccacttggtcactggctctctatctatagtcactgttgtacaagcctgatcatttcccctagctttaatgtattgtaacgtctttattctgcaaactcaaaaaattccagtaattttccaacattgaagagccaaaatgcacacgatataatgttagacatatgcctgcaaatcggttaattataagaggttgttcaaaaagcaacaggaggtgttcttatgattcacatcggacttaccggatggggggatcaggaagatctctatccaaaccgtaccaaagctaaagacaagctcagtctatacggacagtacttctccaccgtggaggtggatagttccttctacgccgttcagccgcgggatcgaatggcacgatgggctgccgagacacccgaatcctttgcttttatcatcaaagcctatcagggaatgaccggacatctacggggcaagccctacttcaccagcacgtcggagatgtataaggcttttcgggaatcactggaacccgtcattgaagccggcaagatgcaggcagccttgtttcaatatccgccttggtttgagtgcaataaggacaacgtgaaagagcttcgtgaagtaaaacttcgaatggagggcattccgtgtgccctggaattccgtcatcgtagctggtatgaaggtgacatgcgcgagcggacgctttcgttcctgaaagagcaaggctggattcacagcgtctgtgacgaacctcaggcaggtctaggttctatccccatcgtaccacaggcgacggattccgagatgacactggttcgcatgcacggacgtaatgtgtccgggtggcatcagaatggtgcgcctaattggcgcgagacccgttacctgtaccgttacaacaaggaagaattgttggaatggaaagggtatctggagcaattgcaggagcagagcaaggatgtctatgttatttttaataacaactccggtggcgatgcagcagcgaatgcccagatgatgatggacctgctggatcagccggtgaagccttttcctgaccgttctgaaccggagaaggaagaaggaccggagcagctggagctattttaatacgtgctataaacggagttattcatattattgggtgaaggtaagtgtatttatcattgctattatgcagatcggattcgaaattggaaacaaactaaaagcggcaagcccgggggctttgccgctttctttagctggtaatctacccatagaaggctatccacatacattcgtttcgttgcgtcaaacatcagcgctgcgcggctgtaaccgaagaattgatatgcgcctcacggagctgctgattcattttatgcgcttcaatgccagccaagagcacaatgccgatcccatgggtatcattcagattccatcccagatcatcgcgataatacaaggcggtaaacgagtacccggaaccccggcataccccgtatacattgcctttatagtcaatcgacaaacgtgtcatgccgtaccatcctttgcgtactgcctccagatagggctctggctgttccagccagccttcccgaataccacgggcataagcgtagatgaacatggacgtgcaagaggtttcttcatatgaatccgggcggttcagcacctgatgccaaagcccattttccccttgcaacgctaaataaccttcacttaaatcacgatagaactgtaatagttccaaccgtttcacatgattatgtggcaggatggataacaattcggttaatgaaaagagcacccagccgttcccgcgtccccacggaatacctgtagcctgaccacgcacaaaatcatacacatgggacatgatctgttgatcgggaatgtagaggtatttacggaacatcaagaactgattaaccgcatcatcccaatacgtcgcatcacctgtcaactgaccataacgcatcagaaaaggtgtactcatgtataagtcatcacaccacatcgtctcctgacgcatctctccactgccccgaacccggtaaaaggtaccatcctccaaacgttcctgctcatccgtaatgtagcccgcaatccgatccgcagtatctcttcccccacgaatatcaccgaactccatcgtagcaagcagcgtagacccaaacgaaccgcaatcatccagactgtcgatggcagacagctgattattgatccctgcagcaccgtacccttcccgatcccacagaccatagcgatcaaatgaagtactcagttcaatatgttgccgcacatactgaatgtaatcatcccgtcccaattcctgtcccgtctgtagcagtccaagcagggtaacgccaagcggataattccattttccgtaatgtgtattttccaggtaaggacggacatgggtgtcgggaagatctacccgccaatacacaccttgtgcgccatcatcaaatacggtatctgttcgcacgatgtcggcatgcgatggttcagcaccgggagcaaacacacccgtgtacagccaggggttagaacatcccgcaaccggatgaggcgatttcagtctccagcctgtggaatccgaacgctcggcatattccaacgtgaatccccatgagccgccgactgcctgaatttcacctttcgccaccagatcggatgtaccgtaacggcgtgcgagttcaactcggaagttaccgctacctccagcagagtatacttccgtaccatccacatacagggtcaaagctccatcatgacatccttgtaaaataactggcgttgatccgggcaaggttacatccagtttggaccacgcataggcaacagccggttgttccgttccaaagatgcgggcaaaagaacccatgctctgttcctcatctgtccagcccctgcgcggataccaggtaagacccgtttcttcttccgtcatgccgtcacgaggaagagatactacaggttcatcgacgggttccgaatataaccagccctcctgaccctgacgatctcccccaggagtgaggaagtggagcgggaaatttttgaacgaggctgttccgtagataccgccgaatcccacttctgttttgacaaaacacagcaatacatcattccagccatagttcacggaaatcggaatctgggttcttcgctcgggaaataactcctgtaacaactcagacttgaatacctcttcaccgttcacatagattgtcaccggactataacagttcaagcccgtatttaacgttgtattctgctcgctccataacttgccccatacatacacgtattgccctgcacgcgcctctacgcatttctcattcagattcaggtcgtagcgatagtccccaagtctacgaaaacctccctgatgataagctctgaacaaaaatgaatgtttcggatgatcgccaatataacgctgagccaccgtagttaatatatccggaattgaatcgtgcaccttgcctgcaatcgcctcgttctcatgaaaataacgaatgatcgtcagctcccttcccttataccttgattcgttcgcttagccgcaatgtctctccgccctgcacttcaacaacctgctgatctgccgtgaaccaaaccgggatggcagacggattatggatgatggagcgatctgctgaacactccaatcgttgcaccgctttccaataggcaatcacttcgatgtttgtcgcataccagatatcgtccctgccgccaatctgctcaccgaactgttcgatgatctcccaattgtcgttgtcattgaactcataactgtgaccccagacgtagagtaatagtggtgtacctgttttggaatgttggataaaacgtttggcatgccccgccagatcatggttatgatgacacgtcggatgccattcaagcggccgatctggcaacgtgtatctgccatgtgattcaacggtacgggcataatcaatgccaagccactccagctttgtacttaacgcacggtcgtaccctccgttgggataagccatgcctcgtaccggataacagacgagctgctccaatgcttttcggtcttcgataatctcttcggtcaatagttcattcggaacataaggtagcgtagggtgagtaaccgtgtgaacggctacttcatgccccgtataaagttcagcgacttccccagcctcaatgcggcctggattacccagggtaccggagttcagattaaaggttccccgcagaccataccgattacagattttcaccagtctgcgatcatgcaccactccatcgtcataactgagcgttaacgctttcatcacacctcctggatagcggtcaaactgaatacgatgtcccatccctgctaccactcctttatccgaattcttcaacaggtacatgacctgcatcctgtaatcgatgatgttctgaatcaaaatacgtaccttccagcaggccaattaatgtgttcgtgatccgtacttcaatgtcgttgtctcccggacgcaaccagcaggcctctcctttccaacgatacggagaccagcatctcacacccagactatgtccgttcacccgcacttccgtcacatcctgcacccgccaatcgctaaattctaattcaaacgaggtaatatcttcccctggctcatccagccagaacgtgcgtttataactcatttcccctgcaaaatggggatacagcggctgcggttctggtccgatacaaagggccgtgtccgactcccgcacgagcgaagccatgccttcatgatggaactccacgccgaatcttccctgtagatacaagggatccacaatgccatcctcatctttcgttacctgtacgatgaccgtcatttcgttgagaccgctgtgcagcaactccgtaatctcacaagcgatgttattgtggtcggttatttcgattggatcgaattgttccttttcaagtggttgcccattaatctccatggaccaactgcccgagatcgccgctctatccataaataacaaacatgcaggcaatgccgttcttagctcaaatgtagtcatatatcgacattcgatgggataggctaaggatgcttttttcggtgtgccaaatacctgattaaactggactggcagatgctgctgctccgataattctgccgcctgatcaataaacggttttacagctacatgctggctttccagaatcacaccattaacattggaagcctgaagatggaattgtcccattcgcaaaatgttaggctgcaccgtttcgagtcgccatggcccttccgaagggaccatgatcttacaggcttgattagctcctgccaatacatccgttacgaacgccgaacccgttttgtctgttacatccaccttcgttgttaatgcctcttccttcgcaggttgtaaagtaagacgaacagcatgcgcttcataaggcgccagtgttagtgaaatgcaccattccccaccactgctcgtatacggcaatgtctgaagccgccctgtctccagatcaagtcgttctgccacaatacaagcaccctctgtcaactccgttccatcccacagctgtctggcgaccagcttcaattgaccaatcaggtcctgaccctcctgattggtcagaaaaaccatatgctccccagccgacaattgacgggtatgcatcagcagggaggcgctttcctcctccatgatccaacagatgggttccggcaatacctgatcgagcaggagagagattagctccagcgaaaagtcatctccctgccccgttcctgcgggtagaaaataggcattcccctcaccctgatgccacatggtttcacggttatcgtgatctgttgtcacgctacggccccagtacacctcttgtggctgctcgcccgcaccaaagaactgggcagcttcatctccctctgggcttccctgctgaatcgcaatatgcggaggcatcccaacagagatgacagttcctccctgccgaacaaatcgcttcacctgttcccaggccacggcctccagattcagcatcggtggcagaattaatacgtcataacgggcaacgccgatctgaatgataccatccgttaagtcagcttccgccaacaattcgggatcaaggtgatcatagtcacgtctgttttcgagcagatgtgtcgtgatcctcatccagtccttcgtcaggcgctccagttgcacccgttctgattcgtcctcgccgctatactcaaatccatgcagcggattacccatcagactccagaatgtcgtcgttgggtcaagcacggcaatacgaatgtctgctgttccggtgctcatgagatagctcaaccgtccggtgtaatcccctaactgccggaaatgcttccagtagggattctgcaaaaattgagacggtggtgcgtcatgcttcgcaagcccaccaatcgtatagaaaaaggcgtgaaagttatagaaattagtgcccatggcggccattcgatcaatcatccatttcgcatcctgtagcgtcatcgaccagcctacactatgaaaacattcaatcagattgcggcttcggcccaattgccgggcaagcgaactgaccatcttgggattgtcacgcatcttttgaccatatcgttccagaatccacgataaggatcgtccaattttctcatgggccgaatcaccacctggcatatggctaaacaactgggtcgtcatccgtacaccaggcacttcagccgcatactggattcctgcttcctcacaccaatcatgcacctgtttgtgataggactccctgagaagcaggtgcagtgactggtaatagtcataccgaatccgatgcgcgtccggaacatcaccatataacagcgccggtagcgaatcgatcagactataaccacaacgctcgctgaaataacggggaagctgttgcgaccaagggatacgacccagcggtgcgatctcatccgagaacatacctttgattacgctttcaaattgatctccaaccgctgacttataacgctcatgtgtcagttcaataaaacggctcatcgcttcattgtggcaaggatcaacaaagttgccgtaatatttgaaatcatcgatctccatttcttgaaatataatcaactcccaatcacccgggggaacatcccacaacaagcggaacgctgttcggtaggtgaagaaccgcttgcggttatacgatgtgagtccggtctcctgatacacctgatcggtctggatattaccgattttgctgcgcaagtcaatggattcatgccacaaccgtttgcccttttcatccttgggaatcgccttggcaaccaagactcgtccccacggcaactccagatccacagcttctcccccctgaaccaccaactgatgatgcacgagctgtcgctgcttcgcttcaggaaaatcaagggtcacttccccaccagccatcccgcttggatatggatattcgtcatataaccatacctgcatgccatggtcggcagctgcctgcactgcaacccgcaccttatcgaaccatgcttcagagagatagggaatctgtagtccctgacgcggacagatgaagaatccacctacaccttgcgccgccatctcagccacttgccgcttaacctgttcttcttccatatccccgttccagaaccaaaagggatggaccctgtactgcgcctcgggattttcaaaagcatccccgttccacatgttgccttcctccctgcctgttcaagagtgtatgatatccagctttaccaataacgttcatttcagttcaaataggttttttttgatttgattatacatcaaaaaccatattcaggaagtcataatttccagaaagttggatgaaactttgttcacggatcaagccattacagcgataaggaaagcccggctgtttcccctacactgaaggcacggctaccgggctttggcttataagactacttcagtgcagcgtacagttcattaacttctttcacataatcgtctccgccattattcttccacagggcaacagcatcttcgaatcctttctcatcaatctgacctacgatatatttgatccgtgcatcgttgatgatattgtccagctgcggtcctttctgagcgtaaacatcagagatcagcggttcgccaggattggcaatgacaatctcttcgttggctttctgcacctgtgcaaccttttcacggacaggtgtctgttggacacgaagcgttctgtcttccggcacaaacatcaaaatctgatttaaaccctgcaggtcgcggagcgcaagcttgtcagtgctcggtatgatgtagtcttcttttttctcatactgcttgccttccagtccgttgtacaacaatgcctgcaattccggttcattcagctgatccagaaaactcagtaccttcttcaggtcttcttccgttttgacactgcttttggagatcgcaatcaggccggagtagccggacgttggcatatcacgcaatccctttggaccttccatcgcttgcagcacatccacgcgtcccgtcgcattggggtctttatcgagtattttctgatccatccgctgcgcattatctgctacatccaccatgacaccggcttgcccattcacaaatggatcaggaagcttcgttgcatccatcacggcaaagtccttgttcaccagaccttcgctatagatttgccggaaaaatttcagggcttccatgtattctggtgtctcatgcgccggtatcaggcctccgctgccatcatctccccatttgttgggcgcaccgaaccatacctgcatgttatcccacgggcccgtgaatttgctggcaaccagaccgtacgtatcatccttgccgttaccgtccggatcatccttcgtgaaagcttttaatacattgtaaaattcatcaatcgtcttcggctcttccagccccagattctccagccaatctttgcggattgtaaccccgttacgtcccagggcccgtgcccggtagatcccataggttttgccatcgattgatgcattgttggtgatgatttcattcagttgactcagattcggataatctttcagataaggaccaagctcccagaatgctccggttcgggccgcattaatgaaacttggagacttccctaacaccaccataatctgaggcagctttcccgaggccagtgtgatgttaaatttgtcttcgtacgagctgctcggcacccactgcaggtttacatccaccttggtcagttcttcaagcttctggatgaccgggctgttctccggcggattctccgcttcgaagttcggaagcataatggtaatctcgtcagttccacccgcagcggtccctgaacctgctttgtccgtggagcatgccccgagaattgtactcaataccagtgacgcagagagtaacagtgcaccttttttgaatcccgttttttgtcccatacgttctcccccttggctttagcctttgattgaacctaacatgacacctttggcaaaatgcttctgcaaaaacggatacaccagcaaaatcggaatggtacctacaacgatcaccgccattttgatcgactgctctggtggctgtacaaagttggggtccatgtttgccatatctccgacactggcttgcgagagtaacacgatctgtctcagcatgacttgtagcggccatttgtcactgtcggaaatgtacagaagtgccgagaaaaaattgttccagtggcctacggcgtagaataacgcgaacgtggcaatgaccggctttgataaaggcagaacgattcgccacagcacgcctagatccgaacagccgtcgatgcgggccgcttcctccagcccgggcggcatttgctgaaaaaagtttttgacaacgattaagttaaaagcgctgatcgcgccaggaagcataagggcccagtaagaatcgagcagtcccagtccacgaatgacgaggtacgttggaatcatgccaccgccaaataacatcgagaaaatcaccatgttcatcatgacgttacggccccagaagtcacttctggatagtggataggccatcgttagtgtgaagaacagattgaccagtgtacctgccaccgtgatgaaaatggatacaccaatgctgcgaaagatcgtggacgatgaaaagatatactcatacgcgctgaaggaaaacaccttcggaatgaggaaaaaactgcgttcggtgatctcggcttccgttgcgaaagaattccctataatatacaggaacggaaggacggttaatatgcccagaatccccagcatgacgtaattgaagatatcaaataccttgccggcagggctgttgtatagacggctgttcatgggcgctcctccttaataaattccgggatggccgaattttttcgcaagtttattgctgccaagcaccagaataatccccaccacagacttgaatagtcccacagcggtactgtaactgaatgcaccttgcgtaatccccaccgtgtacacatacgtatcaaatacgtccgccacatcccggttgagggagttggtcattagatagatctgctcaaatccggtatcgaggaagttccccagtcgtagaataagcaaaatgactatggtcgtacgaatggctggaagcgtgatatgccacatccgccgtaatcgtccggcgccatccacaatggaggcttcatactgctccgtatcgacacctgcgagggctgccaagaaaataattgtgccccaacccatctccttccacatcatctgaacaataataagcgggcggaacgaacccgggctggagagtacatcaatgggcttgcctgtaatccaggcgatcaggtcgtataacaccccgccttgcggggtcaggaacacgtacgtgatactggcgataataaccatcgatacaaaatggggtacatagaccagcgtttggatcgttcttttgaagaaagcgacccgaatctcatttaataataaggcgataatgatcggtgccggaaaaaagaagataagatcatacagggcaaggaccagcgtattgcgtaatagtcggaagaagtccggattggagaaaaagttcgtaaagttctctaaccccacccagttactctcccggatgcccagaaaaggctggtagtcctgaaaggcaatgatgatcccccacatgggcaagtatttaaagatgacaaagtacaaaaagccgggaagcacaagcacatataaccacttgtttcgtttgatctgcctcttccaattggactctcgtctcatgggccttgtggccctatccgcttgggtggttgcagtgccgttggtattccagtccgtcttcccgttcatcatgtctcccctccctcaacgatgtaagcgttatcaattaccctgttatttagactatacagacgcctggtttccggcaaccttcattttttgcattgctacgacatgatggccgaaaagcccgctataacgccattttcacaagaaattgtacataacgtagcaggtaaaattgcacatttttgcgggtttatccttctttgtatcacggtaaaaaaaagaaaaaaccaacattcactaaagctgaatgccggtctgaaatgacaaagatataaaaggttattgtccgaaccattgatcgcgatactgactcggggtaactccctcctgtttcttgaagatccgattaaaataactgtgctgatatcccacagccgctgcaacatcattgattttcatcgttgtctcccgtaacaattgcttcgccgcatccattctcacacgtgtcagataatcaataaaattgatgcccgatacctgtttgaatgccttgctcagtgcataaggtgtcatctgctcctcgtcagcacagttttccagcgagatgtcgttgcggtaatgtgtatcgatgtacaacatcgttcgttccaccaccagtttcagcggttcctgcgatcgtacctcaacctcttgtatataaggtatgagtacctcattcatcatccattgcttcatctgtacaggttcacgaataccggatagttgctcatacatgttgtaaccaccaaacagcttataaggtgtgacacccgtttgcagcatcatgtgctgaatactgccgagcaattgaagcatcatttgctgaacttggaattcggtactgcccgtccgcgtaatctcactcatgaattgttccagcacacgttccgcttcggtttgtttgcccagcctgaccgcctgtaacaattcccgttccagcccaagcggataggaagctgcttcatttctgcggaaacacgcctcatcctccagatcgagaatctgacttccttcctccacactgcgataagccacggcctgttccatctcgacgaatcgtccgggcagttcctgaagtgaagctgccgggcgactgaccatcaaggtcaccttcattttgagcgtacgtccaatgacctccaccagttcccgtccccataacagcgcttgtgacttcacaggttcgtcctggggagcgatcacaagcatggcggaagacaggtcatgaaagttcatgacactgatctgcctgaaataatttttcgcaacttcctgtgtaatattcactgctgcaaaggtgactaatcccgtgtcctggcttccaaatctgccttgcagctgctcgtaccccgtaaaatacatctgcaccagcaaatactgctgaccctccagctcaaatccgagatgacgcatgcgctgctgtagatcctgctcgttataggcgtatagatgtccctgtacaagttgtaaaacaaagctgtcgcgcagatggggaagctgctcctgcaattggcgatgtgccgtgacactgcgggaggtcagttcgttccattgttgctccagcagctcaaactcgtccagcttggcatccgttggtgttgtttcgtttctgccaggcgtaagcagatgaagcatccgcgctacaggcgaatagatgcggcgggaagcaaaccaggataacaacaatcccaggatgagactgcctgcactcgcaatgacgatgattttggataccagcttgactggcgaagtgactgaggtcaaaggggctgcggagacataagtccagtctgaatcgatccgactcaatgagccgtatgagacagaataggtctgatcctcatatcggaacaggaatgagcggctgtccgcatgcagggctacttcttcttttagctgctgctcaaaagcagaagtctctcccgccgttcccggattcccggtaaccagtgtgtttccttcctgatccataaggaacgttaaaccttcgtcatacggagtaagcgttttcaataaactggcgactttctcgttatccagcgtgatgatcagtgcaccaaacggattaatgctctcccccggtatcttatgtactagaacaagtgcattgcctgcatccgtatgcagtggactatcgttggtcgaaggttcggtatcactgttgatgctggaaacccaatctgtccagtacacgtggttccccatggaaaggtatcgatcatatgcttgtactctggcttcatcgttcaattcggtataatcccgattaaacaagattggcttcggttcctgcaaatacagctgtgctgacttgatcagtggatgagaaccttgtaatacgtataaggtagtcacaatctcctgcgtttcattgaaataatatacaaaatccaacgttcgcagtgcattgccaaacctcggttcaaaagcccaatgggataagttcatctccagataagccagctggtcatccacattacgtgcccggttctcaatctggttctggtgcatctgattgaactcggtttccatccggccaacaacctgttgatacatgacgatacctgtgattagtccgggaatgctggcaatgagtaaaataagcatgaggctgttccgataaaatcgtcctttatgccttccagccttcagatcggataactgcttgaatctgccaaatattcgatcgctcctagtcggttccatcgctgctcacctgcctgcttgcatcgagtctgactgtcatggaaacttcctcaactcccctgagaatatatggatgaaatccttttcttgtattatacgcacattcctcaggtgaatgaaacgatctgtaaccgatcatttttttaaccaatgttttattaacatgacaaaatggattacaatgagatatagcaaacatgaaggaggcctttttaatgaaagaacagacttattttgaacaaaatagagaaaaacacctggcagaactgaatgaatggttgtccattccaagtatctctgccatttcagagcataaagaggatattaaccgtgcagcacaatgggcagcagatgcgctcacacgtgcaggcatggaaaacgtagaggtcattcaaacggctggacatccgattgtctatgcagatcacctgcatgcacccggcaaaccaacggctctgatctatggacactatgatgtacaacctgttgatccgcttaacctgtgggagacacctccttttgaacctaccgttcgtgatggcaagctgtatgcccgtggtgcaacggatgacaaaggacagatcttcctacatatcaaggcagttgaagccattctcgccgaaaacaaggaacttccagttaatatcaagttctgtatcgaaggcgaagaggaaatctccagcccgaacttgcccatctatctgaatgaacatacagacaagctgcgtgcagacatgatactgatctcggatacgtccttgcttgaaaaaggtaaaccggcgatctctacaggcctgcgcggcctttgctcgcttcacgtagatctgaacacagccaataccgacttgcactccggttcatttggtggcggtgtacccaacgcactgcacgcactcgtatccttgctcgcttcgttgcatgatgagcaaggccgtgtaagtgtagatggtttctacgacggcgtactgccactgtctcctgagatgagagaagaatttgtgaaacagggcttcaatgaagaacagcttcgtcaagacctcgggctggagcaattgtacggtgaagaaggttactcgttcgtggaacgtgttggcgctcgtccaacattggaactgaatggcgtatggggtggtttccagggcgaaggcagcaaaacggttattccgaaggaagctcatgccaaaattacatgccgcctcgttgcggatcaagatccacaacatgtattggatcgtatcgaagcacatctgcgcgctcacgttcaaccaggtgcaacgctgcatgtgaaacagatcgaaaaagcttttgctttcaacaccgatccttccaatccaattctgcaaaaagcagcagatgcgtatgagcacgtgtatggcgttcgcgccctctttaccaaagatggcggctccattccgattgttgagaaactctcacgtgtactcgaaatccctgctgttatgatgggctttggcttgccggatgagaacctgcatgcaccgaacgagcacttcaacctggagaactttgataaagggttgttgacgattgttcaatttctgaagagtttgtaatcatcgtgtttaaaaccagttcatgagagcatgctgagtggacgttacggggccgaatcgttctttagatcgctgttatcgtcggattttttggcttccccttctcaaagggtaaaatccgacgataaaggcgaacgctccgcttcttcagaatcgatttcgtccccttcactacgttgcagcttctcgcatgactgattttaggattgagctaactattgaatggttagtgtaattaggagaacaaaaggacggccttcgggtcgtttttttgttatttattttatttctttttttctttgttttttatttctttgttttttatttctttgtttctttgtttctttgtttctttggttctttgtttctttggttctttggttcttgtttctttggtgaaattgtagtttttttgatggttgctttttatgatggagacgatggaggcttacttttaaaaaggttagtgtattagtgataacaacatggtgaccttataggccgtttctttggattttgtcgcgatcgttacgttggagccttatcgcggctgcttcgaaggattgggtctcactttgatgggttagtgtgatagattaccttaacgatgggctgctgaacactttttagattttttcgtttttttcgtttttttcgtttttttcgtttttttctcgataacttcgttatcatgttcctatgactgattttatagacgaggtctcggttttaatggtttagtgtatgggagataacatacgcgaccttatagcctttttttgattcggtctccttcactaggtttcagctattacagcggttgctttattgtgactggttttagacgacggctaacttttaagggttttgatagagataactcaagcgttggcctttggaggtttgtttgaatcgattgatattcagtatttaaaagaaccttatggagtatgatgtggatcgggtaacgaagatgttgatagctaaaggggttttgtggatgggagggtctttcgggattcctgcgttttgacttgcttatgttcagcgacttcggcgcgggacttttgccatgagtgtttacctgctgttccgccccggcaagctaatccaaaatgatgaggtgaatgttgtgtctacttctcacctgaccaaaaatgcgctggctcactcgcttaaatcactgatggagcatactccattgaacaagattacggtcaaacatctggtggagaattgcggagtgaacaggcaaaccttttattatcattttcaggatatttacgcgctacttgggtggatctatcagactgaagcggtggagagtcttacggagtaccgaagctacagcacatggacggacggattctataaaatcttttgttacatcgagaacaacaaaacgttctgctgcaacacactcaactcgctcgggcgtacccacctggatgtatacctctatgaagtaacccatgatctgatcatgggtgttattgatgagctggcctgtgggattaaggtctgcggtgaagacaaagagtttgtcgccaacttttataccctggctttcaccgggctgatcattcaatggatgaggggcaacatgcaagaaccgccaaaacagattattgagaagctcagtgagctaatcgaaggcaatgtcctgaaagcactgcacaggtatgagaataagctgccatccacttaaggatgcgcggcttttttcacatgtgatctatgcctaggttttagacactttactacaagtgaccaaaaattagacactccctttcttttgatcataccttacggaacctgcaaggtttacattagggatgtgattacagtaacttttggaggcgaatgatcgtgaagaaagaacatggtaataaacaggtctattttgtaggcggcggcattgcatctttggcgggtgcagcttatctggttagagattgtgactttcccggagaacatattcacattatcgaagaaatgccgattctcggcggcagcaatgacggtgctggtaatcccgatcaaggatatatcatccgcggcggacggatgctcaatgacgaggcctatgagaatctgtgggagttgctggcttccatcccttccatcgactgtccgggcatatctgtccgacaggaaatcaccgaatttgacgatgccaatcccacacattccaatgcgcggctcatcaaccgtgacggcaaggtcgaagatgtgctctccatgggttttgatatgacggaccggttggcgatgggcaaactgattattactcctgaagacacgctgggtacattgcgaatcaacgactggtttggccctcattttttcaaaacaaacttctggtatatgtgggcgaccaccttcgctttccagccttggcatagcgccgtggaattcaaaagatacatgcttcgcttttttcacgaattcccaagaattcaaacgctggaaggtgtcacccgcacaccgttcaaccaatatgactcgattatcctgccattgcataactacctggagccgtttggcgtagatttcacgctgaaatgtacggttaccgatctggatttcaaagacggagacggcattacggtaagtcggatgcatgtgctcaggggaggtgaagaggaagtcattgacatcctcgaaggtgatctcgtcattgtcacaaacggttcaatgaccgaaggggccgatatcggctccatgacttccgcaccgaaactgaatggcaaggggagctcatggaagctgtgggagaacattgccgccaagaaaccgttgctgggcaacccttcttcttttaatgatcatgtggatgagtccaaatgggaatcgtttacggtcaccttccaggattccgtcttctttgatctgatggagaaattcacacgcaaccgggcaggtaccggtgctctggttactttcaaggattccagctggttcatgtctgtcgttctcgccttccagccgcacttccgcggtcagccggagcatgtcaacgtattctggggatacggattattcccggataacgtgggcgattacgtgaagaagagaatgtgcgactgtaccggggaagagattatgcaggagttgatcggccatcttcattttcaggaacatcaagaggacatcatggctaccgccaactgcattccttgcatgatgccatacattacagcgcaattcatgcctagactaaacagcgacagaccgaaggttgtacctgaaggctccaccaacctggccttcatcagccaattctgcgagattcccgatgacgtggtattcacagaagaatattcggtccgagcagcacgaatcgcggtatacactttacttggagaaaatcgtccaattgagccgatcaaccagtatcagtatgatgtccggacgctgttcagcagttttgtgacttcgtttagatagttgcttatatagagaattaaaacaaagacgaatgaaggaatgattggatggatctgtggatggggatagatctctggagatatctgtagaattcggtgagtaactttgtgatctttaggaagctttgttatcttaattctattaattgtgccaagttagtaagatatgagttactacatgagttagcttcagaagcttgcatccccgttgaacgagttaatgagtgaatatggttgttgctgaactgaagaatcgttgtataaaaaaaatagagagcgttccgtcagctatgacaggactctctctttcgtttactcgtttactatctaagcccgacacataaccttactcgagattgccaactgtcgtctaaagaacctgacaagccttattacttgaaatttcgcaggtttgaaaatctaacgaatcgtagacatcttatttacgctgcagacatgtttaagtaccgaaatatcgctaaattgcattaaatagcgtgtctgagattcgttacattttgtatgactgcaaaatcattggaacaaggcttcataggttcgttagcgctacacggcctacggagaagactacttatgagaatggaatcgtagtgaaatgttgttttcgagatcctagtccattctttcttgaagcctaacttattactcttccatgttactcacgtatactcttgtagtgttcttattattcttggtgtttattttaattttttcgttgatactcattgcttatgagtgccacatattatactcttcctactcacgccgcttattacagcctacatatcacacttcgcttatgtgcggaatgttgtgaacttcagcatgtgcactagcttggataaatgtacgatctcctgctggactccagaggtgtccgtacctgccattgcctgatttgctcgcagcgttctacgtgtattcagcataccctcgatcagtttcatgactgtgttgcgtccacgatgatcgacaatcatatactttttgcgtgcatccagctctacccatacgatgttgctgaatgatgtgaacagatgcctgcggtacagctccatatcggtctcattgtaatgctcgccataaaaggcataatatccgtgtatgtgcaacttctccgccaacactgtgatgaacggatcatgttcgagcatagcgttacgttccatgtttcacgcctccgttatgcgtgatccgcagatcccgtctttttgagatctattttaacatattgcgcacggtgttgcctctacacagataaaagccaagttttaactccgaagactgattcatcacaaatgagagttattagcacgatactaattttctaaatctaatatgactctcctatccgtctgcccttcacccacacaccctcaatatccagctccgcattcagcaaaacgatatctgcctgttttccttgagccagggaacctgtccggtgatcaatgccgagcaaacgtgcaggggttagacttgctgcccgtgaagcagccttcagactcaagcccacttcctgcaccagataacggaaaccgcgaatcatcgtcagtgtgcttccagccagcgcaccgccgtccttcagtctggcctcgccatgcttcacgatcacgggcaggtcgccgattttgtactccccgtcatccaaacccgcagcagacattgcatccgtgatcaatacgagttgatcatcatgttgcttcagctgagccaagattgagatcgccgcaggatgcacgtgaattccgtcggcaatcacctcagcactgatacgtggatcactcagcacggctccggcagccccgggtagccggtgttgcagcggtgtcatggcattgaacgtatgtactgcatgatgtagtcctgcctcaactgcccgctccacctcttcataggtcgcatccgtgtgaccaagtgccgctgtaatccgttgttctcgcagccatgaaatgacttccaacgcgccttcacgttccggtgccaacgtaacttgacggatcaggccaggatattgcttctcccatgcttcgagccaagatacatcaggcagaatgatgtgttccggattttgcgctccaggccatttcggactaaaaaacggaccttccaggtgcacaccctcaagttgtgcatagggcatttcactcgaacgatagcggtcgacttcggcaagtacgctgtccaggcgctctttcggagccgtcatggaagtcgcaagcatcgctgttgtgccctgtgtactatggaaagaagtgatcttgtccaacacctccgggcttgcgtccataaagtcttctccgttcccaccatgcacatggatatcaatgaatccaggcacaatgaggccgcgttccggtacagacagcggcaaagcctcgctccgaatccgttcaggaagaccttcctttatcccggcatagaggattttcccatccctccaggctattacaccgtcttccaatatttcatctgcaaggagcagcttgccccgaagaagagaaatattttcatcacgctggctcccaggttcatggctattcgctccggtcatctcaccagcctccctgctgcacggtccagcagtaccaccacatttggatgacattgcaaaagcgatgcaggacaggccgttgtgattgggcccataaaagcttcgcgaataatctcggccttttcctcgccacgggcaatgagcagaatctgtttggctttcaaaatggtaccgacacccattgtaatcgcctgagccggaacttcatcaatgctgtcaaagaagcgtgcgtttgcctttctcgtctcttctttcaaatccacgacatgcgttcgtcctgtaagttccgttcccggttcattgaagccaatatgaccattatgtccaatgcccagcagttgaaggtctaccggtccacgatcgtccagccgttgttcataggaattacattcctgttccagatctgcagcctgaccatcaggcacttgcgttctagcaatatctacatcgatatgattgaataattgttcgttcatgaaactgcggtaactttcgcgatgttctgttggaagtccgacatactcatcgagattaaaagaagaagcctgtgagaagctgacaagccccttctggtacaacgtgataagctgtttatatatgcccacaggagaacttcctgtcgcgagccccaatacagcccgtggtttggtttgcaacaagctggcaatgaggccagcacccgtggcgttcaagtcttcttcattttcaaaaatgcgtatattcatcttcatctgtcaggcacctccgttgtgttggactcgataagattgcacattatgataggattgttccagtctagggataaaacggtcgaagtcggcacttaccatgcctgtgaacaaaatatcgatcacatgcagcagtgcaatacgtgaagccatatctccacgcctcatgccttcttccagagaggacgtaaacagtgggatatcggatacagttgcaagcttgttactaccataggaagtcagtgaaatcgtagaagctccggcctgtttggcacaatgcagggcatcgatggtctctggtgtttcgcctgaataggatacggccatcgccacatctccctctgcgagcgaagatgcggatgtaatctgcatgtgtgagtcggagaaagccgtacagcttttgccgatccgcaccagtttctgatagaaatcctgtgtaacaatcgacgaggtcgccacaccatacagatcgatgcggcgagcctggcacaataattgcactgcttgctccaatctgcccaaatccagcaaacgggtggtatctgcaatcgacgcgaggtggttggcttcgatagcttcaacaattttggatagggaattgcccgctacaatatcctgatacgccgtttcatcagatgcgtgggacaattctgcggcgagtttcattttgaaatcgggaaaacctttgaaatgaaacgacttgcaaaagcgggtcaccgtcgccgcacttgttccactctgctctgccagatgactaatcgtccagccgggaatgtccgatggagattgcataatgacttcggcaatacgtcgctcctgagccggaaggttattcagttcttgctgcaacgcacgtaatatggctgccatgaggacctcgctttatgaaaattatttttatttatttttaacaaattaagaaaatcatttttataactttattctaatcaagacgatcctgcaaatcaagaggaatttaacatgacttttgcaatatcaaaagaaggagcaattcaatgaatcaaagacaacggaaaaagctcattccttccatctggattatggctaccaaacaaacagaagcacatgcctattatgccctttatgctattgactggaaacgcggaggtcggttgagttgggagggctggaatcagctcgaagacctgctgcaatttcatattccgatcaaacgaaaagccggaggccggaaatcttcttcccagcctgccgccaaaatagcgaaaagagccctccatcttcatctgaatgaaacacagttcgaggaattggagcagctattttatcagccattttcgaagaaaagatggaggatgttcattcaaatgaataggaatcaataagtgatatgaattcggttatttcatttttcacgctaaaacaaaaaaagcctctccccttctttggataaaagaataggaaagactttcgcggtacaacgattcaattcattttgattcaatttaactcaagttaactcgttctaactgatgccatcatatcgttttaagaacttactggctaagctggggacagtcatgtgatgaaccgattgattttcaatctcctccgccagatcgtcatctgttagagaaacaaagaacgtaatgtctgcttttgcttgtccatatcgggcaaaaacgtcatctgctgtctcatttacaactttggcgatgattcgaatgatctcatctttatactcctgaacttcttctgttgcatacaacaatcggctgatgtggttaaagtgcgtatcctcgccatattgatattcggagcagccccatctgtaatagatctcgtcctcctcactatcacatagcccttgctctttcatactcacaatatgcccagcaagggattcctctgtatttaccgccaaaaacagggtaacccaatcactgtctgttccaaaggcacaagcatatactttctcatcctgcactttagacagcgtttgttccagatcgggtagaaaccccgctcgaaattggttttcaaattcatttaaaaaacggtccactcagctcatcctttcattattattataagttgaaataccgaatagttacacttgccacttcgctgacagaataacctttcgatcactgttatccccagattttttgaatcattttttataagggtgaacatctggggataaaggcgaacgctccgcttcttcaggtcatttctgtcctctacgttctagtgtaaatatgtagtttaactgatggaattgggttttaagaacccaatcgtccgttcaaaccattgtttcaattctactgccttatcttcatatatgtaatcattatggtctactaaaaatgaaaacaagcgatgctacgtttcggatcttccctcaatttattgttaacccccttattttatggtccattgcagcaaaaaagccttgccccattcttcatgacaaagaatagagaaaggctttcatgctgctacttaatcctaactgtaattcgcaactaaatcttcagttctccaagcttaatcagctcgacaactgcctgcgaacgacccttaacattgagtttctgcatcacattcgaaatatggttacgcaccgttttctcgctgatgaataactgccctgcgatgtcacgcgttgttttgtcttgaaccagtaattcgaatacttcgcgttcacggtgggtcaacaaaaatttgcttttatgatcgatacccttcaatgttcacccctccttgctcgggttgtgttggtgtaacaaggttaaggggatacagtcaactcatcttatgtcaggtcaagggcgttggttcagttttataagaaaaatgggcagtaatttgcatacatccctctaaaatagttggtgcatagttcaaaaaattatgtattaatcagttattgttcttccaagccctttcggtataactccaacgcttaaaaaactctttctcatcaattattgaatgataaacaggttcaagaaaagaaacaagagcatccatcacatccagaaatgcaagttgttcttcaacccctaaacgacgcagaaaagcctgccactgttttgtccgaccttcattttcagcaaattcttcatgaaacagaggatgctctttttcaaatattgtgccccgttgttggaaggtttcggacactgcctcgtgaaggattcgaccatcaaagttgttcgttgttaacagcgtataaatatcataaaaatccttcatccgactattcatcacagataatgtgatcatggcttcaaatttttctgaaatgacggattccctcgagtaggcttgaacttgtggtgctgtcatatccaggagaacaggatattcaataagctggggcttcgggaccaccacatcaccaaatccgatatcaaactgcaaactttttctcatccgccctaaaagagcagttactttaattcttactccctcataatcagcatcttctttaattctctccgttgtcagttcatccaactgaaatgcaataccatccgtaggaaccgctattgagcaaatggagacaaacgactctcttaataaatccagttcattagcaatctgtctggcgagaaaatcaacgtctttggttggacgtgccttgaattgagtttgtgagaacaaaaacaacccgccctttaaaatgaatttatccctgtactcagaaatggataaacgatataagaaacgctcctgaaaataaagcaacagcaaggtatcaaatgcttttcctgattttttagctatatttttcaaacgttcagaaacagaggcgggaatatttttaatttcactcattagatcagcacctccagatacttttgcaaaaccgttcgaattcgtagcttatcagcataggagacaagccttgttatattcttgtggggggattgaaggtaattcctcagcccttccttcatcaaatcaattccaattttctcacgatacctcaccatatcacaaattgttttctcacgatcataaattttaactgccgagccatcaatatagacttcatcaattccaattttgtattgagcatctgccaaatagattactttaataggaggatagtctggaagctttggctttttaccgccacgatgaatagcaatctgatattcccatggattgtaagttgtcagttcatagaaggagagcgcagagagaagacatataactcctttgggaacaagtttggatacctcaaccatttcatggggcggttcattaaattgaccagactgtcggtaaatcccctgttttacccgttcaatttcaccagcggactccagtttttttatgtagtaaggggatacgcccgcttctataaaatcttttgttcgagcaaaaccatgctgttcttcaaatactcgcattgcagcaactacaattttctcgttcatacactcaccaccattcacatttgcgcgtgcatttcttgccttatctggatctgttcagaattttctttccaagttcattctaatccataactattccacaccctaatttcaatcccctttattattcactaaaaactctgcacttagacgtaagagcagaatataattcttttaggagcgcaagaatattagatggtacttcatttcgttagtctatttagtctatatggaagacaaatattctgaatttattgaagaaacattcaaagtgaatcctgttgagattatgtaagacaaacatgcccctgcagcagatgttaccatctgcgcaaaggcacacttgttcatgtcaaaaaactaccgattcattcgattcataacaccaccgttgtgattacggttcatcaggccatcgtcaaggatgccatcacggttattcgtatctgttccgttcgttgggaaaatgcgctccaccatcgattggaacgtatcgatcatgccactaacgggcttaccgttacgaatatctgtggcatagttctcgacatgctccacaaaatccggattggctgatacatatacattctcgatgtttggtgcaaactgtttgattttggctgaaatcttacccttaatctcagctgatgtgttatcgtccgtgctatctacacgttgtccttcacttttcataccataatgcccatcgtctgtcccacgtgctttgccgctgtttgtcagaccacgcatcatgccaacggcgcctgtgcccatggttccatagatgctgcggtcattccccatatggctgcggtccgttgccgaatttgtgttcagtcctggagcaattccgctagtgctgtacggagacattgtgcccgtaccgccattcacacgcataccacccatatcgtgattcatgttgcctccacgcatggtatcactggcatgattacgcatcgttccattcagcatgctcgtacgaccattggacttgctctccaacttgcctgcatgaccatctgctaaacgaaccgcgacataagcattacgatccgttaacatgacacgggcggattttacttccttcatctccgtgatacgttttgccagctcttcgctggatttcaggtcagtaacattgtgcatgcgataacttttcgcacggatgccatccatgccatttgtttccacaccataacggttaatgccgttggcttgctgacgaacactttgcgtatgcatattgttggtatcccgattcgtgccacaacctgtcaaaccggccattacaaagattgcagtagataatgataacgtaatagctgttgcctttttgactgctggcatgtactcatcctccaatgtttgttggttttggtcacaaagataggatgcgcttctgtacgtaccgatatgctgaaaggatatggtaccttaccctgtagattcaggttttctggttttggtctttgtttattggtctttgaatttttgatctctgaacagtgagggcttcaagggctccaccaataaaataaaaaaacagtgctgctagttcgcagcactgcctcgaaatcatatttgcatctcaacacaataacatcacttatcttccgccccgctcatttcccttctgttgatgaggaagtcgtttcgtcctttggagaactagatgactcttctgaagaagttatggatgctttaattgtatccgggaatttctcggcttccgttagacttgtcgcatccatgccatatgcccattgaccatccggtgtaatgacccagatctgatccgattcggatggcaccgtaattcctcgatatacatctcgaacttgttgcccattgaccgtctgttcaacagacagggtgaatcgtggaaacgaattcttcaactcggacgctttgcgcacatcatctgctgtcgacaagtttttgattttgccgataagagatacggcatctgtggcttcaatcgtttttccattcagtgtccaggtctgctctgccgcatcgttctccgatgtggatgttaacatccaggtagctgcttcaccttcccactccagagacccaacatttgtctcatccatgttaaaaggtgtagtgtctaataagtcacgacgagacaaagctatgctggtaatcgcctctgtctgcacagcaaccacagggccagaatcaacacgcacataacgtgcatcatctgctggaagctggccaccaatagccagtttgatctcccgattatctttgagtttgatatccatacgtgtagcatctgttcctaatccgtacttatccagatccgttggctcttcttctaccaccagttcctgatttgcaccactcagagcatccagccagctgcttacactgtaaccgttcagaggataggcttttggctcaaccatctgccatacgccattttcaagcgtcaaagtcgaagttgctgctgcatcggatgtcacctccgttgtgtcatgtattgtaatagattgaacatccccggattgaataccaagcaacttggcttgaaccgcttcttcttcccgaaaataattttgactggccgcgtacatccagcccacaattagtacgatgaccaccagaatcgttggaacccattttctcatactcgtctgcgcctccaccataagagtacaccaatgataacaaagatgagtgggaatgctacaatagccacgaagaaaatcgttctggcttgttcgccattcaggtatgccatctcatacccagcttgtacccttggacgaatcgtcaatccattttctttctcactcaaatagtttaccgtattcaaaataaagtcccgattgccaccattcgcaatttccgaatcctgcatgaaaatggacgagcccagaataactgccttcggtttaccatccgtcgtatcggctgcatatcctaattcaacaggtccctgaatgtcctcttcggcatcattggttgtttcattctgcaataagccgccgatatttgtctccccataactgtcattcgaagaatgaattaacggtgaaagggtatatttatcctgttctttgctggtcaacgcaatcgacagcgacaacatcggatacaattggctcgcagcgagtttgtccgtaattgcatgtgtaccatactccggcaccacccagagtggccccatcgtactggcttgctgattatccaccatgaccgcatgctcatcaacgacgccatagtcagccatgagggcatcgatgtttttccaactggatttcatatcttctacaaatccgagggataataacagcttgcctccattactcagatatgtacgaatggctttcatttcggtatcactgagatcacgttgtgggccaataatggcgagtacatctgcatcttccggaaccttccctgcttgattcagctgcaactcttccgtctgcacattattttgttccaaggaggattgcagcgtagtcatctgagcgagactcagctcttcatgcccagtcaaaaagaccattttgtgcatctccgtggatgacatattcatgagcgcctgcgtaagtttttcctcacctgtgaactgatatgatccgtcacttccgtcacctgtcgcggtgaacagactggcgatatcaatcactttgtgttgatctccctgctccagcacaatggagctgcctgttatgccatatttggatgcaagcgcaggttcctgcgtcagattatattgttttattttcaacttgctgttacgtttcgtgtattcctcgaccatatccgtgacctcacggttcaggacggtgttgttggcattttcgaccgttaacaccagaatgttgacgtcatccttcacatttttgatcgcagtaagggattggtcagataacgtgtattgtttgttcgaggtcagatccagctggaagccgccaagtgaattcaggaacagtgttagcaaaataaagatgccaatcaccgctacggacagcacggtactgttggtatgacttaaccattttttcatcttctcacctccaccgcttccgttccacaatttgaatgcttaacagcagaaacacacccgaaagggtgacataatacaagatatccggcccactaagcacacctttcatgaagctgtcgaaccggttggtcagagcaaacgggtccagccactgttgcaaagcagaacctgtattacctgcgaatgaatcaagcatccacaaaacgagcaaaataataaaacccgccaccgcagacaccatctgatgctgggataatgtagaagcgaacagtccaatcgccatcatgcttccgcccaggaaaaataaccccagcgcagacatccatacggtcgtcatatccaatgtcccatagaacgacatgatgaatgggtacaccagactgcacagaataagcacgaccagaatggccagagaagcaagatatttgccaaaaataatttctgttactcgtgccggagaagtcagcaacaattcatccgttccctgtctaaattcctctgcaaccagtcgcatcgttaacaatggcacgacaaacagcagcatggacaacgtatcgcccaacacgagacgataatcaacaatactcggctgataatatacaaagcttgaatagaacagtagactggtcatcagtacatatacggcaaaagcaaaataggacgttggtgacagaaaataagcttgcagctctttattacataccgccatcattcgtctcatttggagtcctcccctttgcgatcttggggagaagcatcggctgatgtactaactgatgttcccgatatactcgacgagtcgatgtccgaagttacgtcctgatccatctctgccccagcaaccttatccacatctgccgaatttgcgtctgtgtctgttgcctctgttgtggtcagcttcaggaagatttgctccagactcaggttctccttcttcatctccagtatcggtaatcctgcacctgacaaaaggtagaacagctcctcccggaaatcttccgagttttctccagtaagcagcattttaaccgtattcgccgaatctgaattaagtgaagtatctttggcagtattcgcatccgacgcttgaatgacttcactccgcaccttctcccatggtgtcagcacattatgtaattgctccgcagtggccttcacttcaatcgacactttgaactgatcccccattgctgatccgaaatgctgaggtgaaccatccagcacgagctgtccctgattgatgatcaacattcgattacagagcgtgctcacttcaggcaaaatatgcgtactgagcagcaccgtatggttctcccccagttctcgaatcagatctctgatctcgataatctggtttggatcaaggcccgatgttggctcatccagaaccagcagatctggcttgtgaataatggctcctgctagcccaaggcgttgtttgtatcctttggataacccacgtaccatttgcctttcccgaccctgaagtcccagtctgctaaccatctcactgacccgcagcttaacctcacgtgccgggacatctcgcaaattggctacgaatttaagataggactgcaccgtcatatccggatagagtggcggagtttcaggcagatacccaatcttggaacgaacacgctgaccctgctcatgcaccgacattccatccaccataatggaacccgcggatggatgcacataacccgtaatcatacgcatcgttgttgtttttccggcaccattgggcccgagaaagccaacaatctcaccacgttccatggtgaaatccagttgatgtacgccgcgttgcccttcgtagactttgctgacctgtttcacttcgagcacatcattcatcctttcccgttaaaatacccgtgcagcatcgttcgttatataaattcaactgaaatatttacacttgcactccgatggcagaataaccttccgatcactgttatccccagatttttttgattccttcattcagaaggaaaaatccgctgataaaggtgaccgcttcgcttcttcaagttatttctgccctctccgttatcgtgtaaatgttacgttgaacttatgtaatagatgatgggcacgggaagttccttgtatcttacgggagctatcctagcctcagcttaatgacacttaaaagacagcttaaaaatttttgtccaaaatgtgaacattctaaccaacacccacaccctgcgcttaaagccaacgtaacatagagtacaggagaatgtgctcctgaccaaaagtcagagggtgaatcgtgtgaaagtattattcacgttttatgttccgagcggtggcgtggatacgttaaatcgactgcgcaccgctgttctgaaacgccatggcattgaagcgcacctattgtatctcagcacaggctcgggattgcagaacaacagtgatacacccattttcaccgcgtccagtgacgaggatatccatcatatcatccatactcatcattatgatgccatcattgccacttcagacatcgctatgcccggccgtttgagaggacttggttataccggacgaattatttttgaagcgcagggactcggagcacgcgatcaagctctggaaacgatacagatgggtgtcccatacctccaagctcattgtgatgctgccgttatacctcccacagaccacctgctggatatgttcattcatatctgtccttggcttcatcggtttgttattcccaacatgctggatacggacaccttcgcaccaatcttggtggataccccaccctatccggtgctggcttgggtaggacgacttgaacacaacaaaaattggcgtgaatatctaatcatatcgagtgaaatcgtcaaaaaaaatccggaagccagactatggttattccacgatccaactttggctaatccagaagatgaagtcatgttccggcacatgctggcagaatacgggcttgaggatcgaattggcatttttatcaatgttcctcattctcagatgcctgcatattattccatgattgccgcttcagggggcatcatgttatccacttccctgcttgaaggattcggttatgccgtcgctgaagccatcagttgtggctgcccggtgctcagcacggattcggatggtgtgcgttcatttatcacacataataagactggtaagttttatccaattggaaatgtagaggccgctgtagccgaagcaagggacctcatgaataacaagaaactgcgtgagtatattcgcattcagggcagacagcatatgagcttgtctttttcaccagatcgatatgccatttctttccgtgaaatgatgacagcactacgaattttccattgagcatagaaaaaaggcagttcagcaaaatttctctgaactgccttagtatggtttttataaaatcttagtgtcccatcatcatcgcgggatcaggcttgtcgccattttgaagttcttcttccggcatcggcttaggtttgcgcagaatcagactgagcaaacatccgaacaatgcaatacaagcggccaggaaaaacgtatcattgaaaccagccaccaaaccatgaacgatagcggtcggctctgtactcgttgtattgtctgcgattcttgaagtcaggaagcctgtaagccctgcaaccgcaaaggacacgaccacttgctgtgcagccgccgtgagcggtgtcacccgtccaaccaacttacgcggtgcagcatttaatacatgcgtattgagtggcatcatggacaagcccatacccagccccatcatgaccagagccgttataatcaggccaagacctgtctctgccgtgatggaggacagaataaacaatgctcccgagataatacccagacccacaaaggccagaggtctagcaccgattttatcaaacaatcgaccaccaagcggcatacccactccggaagccaatgcctgtggcaatagaatcaatcctgtttccagtgcagtgtaccctttgatctgctgcaaataaagcgggatcaggatcatcgcaccgaacagcgccacttgtgacacccatgcgagaataattccccgtgagaaatcagaagatttgaatacccggagttcgagcaaaggattttgatgacgaagctccacaataatgaacaaaatgagcgctacaccacccacaatgacacccgtcaaagttgctgcagacgtccagctcgttccgccctcactcacaccgtaagccagcatcgagaacgcaattggcgccagaatcatgccgagcagatccagtgcaggtgtgcgtccacgatctgtatccggcaaaaacttgatacatagaatgaaagctgcaataccaatgggcaagttaatcaggaagatccagtgccagctcagtgattcaataaaccacccggacaacaccggacccaatgcgggggcaagcaacatcggaattcccagcatccccatgatggaacctcttcgctcaggcggagccagacgaaagaccatcgccataccaattggagcaaccatgcctccaccaaggccttgaatgatacggtaaatgattaattgctcaggtgattgagcgatcgagcataatacagaacccaaggtaaacatggcaatcgtgaacagaaatactcttttggcaccaaaacggtccgttaaccagcctgccagtggaataactgcagacaaagccaaggtgtaacccgtaaccgtccattgaatggtcttcaggtcggtctcgaaatattgaacgagattcggaatggccacgttcaccaccgtgctgtccagaataaccataatcattccgacgataattgccaggagtggcagtataatggctttaagcgaaaactctgccggctcctggggtactgctgtttgttctttcacgttctccacactcttttccagccagtagatcgcagccttatccatgcgtctcactcagcctatattgacgaccaatttcaaactatcgttttaaatcgtcgttttaaactttcgtttaatactgatctaattctaatgaaaatacctttgctgtcaagctattttttcagacaattctactatggatgcaccacaaaaaaatggaacaggcaccttccctgctccacacgttggttaatcatgattatgcaatgatgtccatatcaatctgcaagcttcatcatctgatattctgacagtatgcccaatgtctgaccgtgaatacttctgcaatatattcgaataaccagatgcttcggtgaagaactgttgctgatgatcctcagttcataaggctcggatgacacatccagattatgaatgacctgattaccgcccgctccccccgaatttgacgttaggtggaaaaggtgtcgatacagttctccgtgaatactggctccaccaacaaatacatccgtcccttcctcgccgcccacataggccaactccacatccatgtacttgacgggaacaaatgtctgtaacaaattctcatgaatctcaagtaaatataccgccactgtagatccctccttcggagcacacgaaccttcctgtacataggatatgcttcctctcgtccattgccatttgcattcacccattttcgaccaattacacggaaatgcccgaccttccggtccacttttttcatagaataaaaggatagaagctcggtcggtgcaggccgtgacaaggaggtagctatgaaagttctgctcgttacgtattgggagcttacacatatgggaggcatatggacatatgttaaacaactggccgacaggttaatcgcacttggtgtagaggttgatatcatgggcacaaatggtgccaataacgaagtatatgttcgtaatctgaaccgcgctttctccaaggataaggtgtggcccatgctgcaagccaaactcaatccgactgatctgccacaattcactgctgatcctcttctcgcttattatgaactgaatagatatgccttcgagatggcagccgcttatctgggggtggaggactatgacgttattcatgcgcaagatccggtagctgccgtagccataaaacgcatcttgaaccgcaatatcccactggttacaagctatcatggcgctcttgcacgcgaagccttttacgatgctcaaaattccaacccacaacttactctcccttcatatttacaatccaagcgtggacgttattttctctcattggaagagcgaagtgcagcacagtccgagctcattctcgtgtcaagccactggatcaagagtacgcttacagagcttgccgttcctgaatcaaagttcagacagattccctatgctgtagatctgccagcctaccgtgcctcagcagctgtgaagttccgccagcgaccacctgcgggcaagaaagtcattgcctttaccggacgacttgaatacatcaagggcgttcatgtgttaatcaaggccttagccagtctgaaaaataaacgttccgattgggtctgctggatcgcaggagaaggcaatctaaccgatgaattgcgttcacaggccgcgtcaacggggattggagccgatgttgtgttctggggcaagctggacaatattccttccttcctgcgccatgcagatatctatgtccagcccagtctgcaggacacccagccgttctccgttactgaagcgcaactggcgggtgtacctgttatcgtcagtggcacagccggcatgcccgagatggttgaacctggacgtacgggatgggttgttcctccgcaggatgtcgactcgctccgtgaactgttggatgcactacttgaggatgatgttacccgaagaacagtgggggcggcggcgaaagcttgggctgaacaaaatcgttcactggaagtgatgggattgcgtacatttcaagtctaccaagaagccatctacagaggaggacatacgatatgacgttacttgtaccaagtgatctatacaatcgctggttttcgactccagtttccacacctcacatcaacgtggattacgctgtaatgaatgaattgatgaaaaagctgcctaaaggatatgtatttcccgatcctgcatccatggtgatcatgaattcaaaagattgagttgtccaatgatatgccgtctttatataacatgccgaaatatcaaacaaggggtgtcccatctgtcatatgaatgactgaggacacccccttctcgcttcaaatgtgttctaacggaccgagaacacgctattacagatcgttttaatctgtcgccaacttggaatacacattcagatcactgaacgtttcgcctgccctctcgtatgctctgagggtgccttcgtatgtgaaattgagctttagtaatagcttaatagaattcacattaccggggtcaacctttgcttcgattcgattcagcttcatattcgagaatgcatgagctaataaagaagagatcgcttccgtagcatatcctttcccccagtgtgatctggcaatgtcatacccgatttctgctttgagattgtcaaaatccagtgcattataaccacatgaacctatgatttcgttggactcttgcgcaaagatagagaaccgaatggccttgttttcctgagcaagatcattcagaagattaatcatggctatagcttgattttcatccgtaaaatgagtgatattcataaatctagttacatccggatcagaccaaattttaaacaagctggccgcatccgatacgttcatttttcgcaaatataaccgttctgtgtataactctgtaatcaatactcttacctccattagtttattaatagttgggtttaagatattgatatctgcgcatagtccagtcccttccgtgtatgaatcatttcattatacagagacttcagcaatcgatcaccctttgtgtccacgtatctgtccataaagcaaaaaaagagcttccacttataacacttaaaaagtgtttcataagggtgctctcctgtccatttaacacctattccattcagccatcgttgccaaatccatctacttccagtacccgccaacctgaagtaagttgaacagaataggcctatgcttcgcctgaacctgttccatctcggcaaccagtgccttgaaatggcgtttggttcccatcgactcatgcaatcggtagcacatcagaggttcattgtagtagaacagctcatacattggaaacagcctcatccacatctcatagtcatgggtgtagcgaaaatcagtgtcgaacagtccaaaccgctcaaatgcttccatctctaacatgacagtacagccgttgatcggacaaccttccagtagtacctgcaacatctccagacgacttcccacttccggatgcaccgtatccaaccattcactcttctcattcacataatggtaggcaccatggcagaatgaagccttgacctcgcgcataaacgtcagttgtttctccacccggtccagcaacatcacgtcatctgagctgagccagacaaagtaatcccctgttgcatgtttgatgccctcatttaatgctgtcgcggttccaccgttttctttgcgaatatagcggatggaatccatgaatggctgtagccgctccacctgctcggttgacccatcatccaccacgatgacctcgatatgcggatacgtctggtgaatggcactgtgaacagcctgctcgatataagcacaattgtaaaaaggaatgacgatcgatacttttggctccattcggtcctccccctcctcttactgtcttaggtaaaatgctgcgcaaagagggcgttaatcagccatcctttggctttcttaactgccctccctacgctacccgccaagcgtcgctattcgctgcaacagcggttcccgatatctggaccataccatggatgcctctctgccgatgacatccgcatgacgtaccgatcccattccaccatgccaccgataggcagtaagcggttcattcaggtatgggaaccgatgaccgttcagtacaatacgcatccagagatccagatcatgggtgtagggaagaagttcatcgaacaaccccactccgctaaagagatccttgcgaatcatgaccgtgcagccattcaccggattgccgttaacaaaccgtcgtagtaaatccatatccgacatcggttcaggcccaccatgcattctggtaactgccgaatgctcgttgatataatgaaagttcgtatgggagacgagcacattctcgcgttgcataaactccagctgataacgaattttatccggatacagataatcatccgaactgagccaggctacataatcaccagaggcatggcggatgccatgattaagtgccgaagccgtcccgccattgcttttgccaagcacatgaatataaggaagatagggttgaagcaactctgcatgccgggttgaaccgtcattcacaacaacgatttccacatcgggatacgtctggttcagcgcactctgaatcgcctgaggcacataagggcagttgtagaatggaatgacaatggatactctcggattcaacttgtcgtcctcccttgctggacacgaacatcactcaggatatcctgaagtgatgtggcaaatggaatcatcggctgccagccaagcttgcgcagcagtgataattcctcctgtttccccgaaccatccggaccagaagatgccccatcccagcgaacaggaacttccgcttctgtcatggataacagcagatctgcaatttcaccaagactgcgctcaactccagacaccaccgggtatactgtaccgctggacccgtgtaccaggagggtcgcatacgctctgacggcatcccgcacatccagaaagtcacgggtattgtcccgtccggacagacggaatgcctcggttttgcccgcctgctcacaggcaacaacatgacgtgcaagcagtgaacagatgcctgtggaaggacccgcaccaatcagattgcctggctccgccagcatgatctgttgtccgaagagcgacatccacgacaaggacaccatttcttccagcgctttactgaggctgtatggatgcggaggctggggaatccggccaggttccggcgtatattttaaccgcgatcctacaataacggttcgtgctgtcggacaactgcgaagcgcatccagcagatacagcacggccatcacattggtctccaggaccaggagcggatcagaccacgaatcaggcactgaatttttgccagcgagatgcagcacatagtcgggctgcacctcgccgatcagatgacgtacttgctgtttatcgttcagatcacagacatggacttgtgcaccttttccgaatgaatacacatccggcctccggactaccgccgcaaccactgcaccaacttcccgaaaataagatacggcatgtcgcccggtaaaaccggaggcgcctgtaatcagcacttttttgcctctcagctctgctccatccataatgccaactccttcagcattgtagaataatccggcaggtctgtcttcacatcctcgcgagtggacaccagcgtacggtcctgcactacactgtcatcacgcacaatcgtcacatcctgcttatcccaggtctgcttgaacaatacaagcaggtcatgcttgctgacaggtgccggatgagctaagtggatcagaccactaaccgatgaggccaggtaatggtttacccatttggccagctcaagtgtggtcacaccgttccagaatacgcgggtataccccccgacttcacctgtgctggacataaaccattgcatcagaccaatgccgccctggcgaatctcgggtccaatgatggacgtacggatcgtcagatgaccttcatcctgaacttcgccaagcgctttggtgatggcgtaagctgaagtcccatccgtaacatcatcttcccgatatgctccccgttctccgctgaacacacagtccgtgctgatatgaatcaggcgtgcaccaatcgtatctgcaacccgccgcagacgatgtggcaggaaaccattaatatgatatgcagtaattttgtcctcatctgcgaagttgttcaacacacctacagcattaataatcacatccgggtgcacagcttctaccaatcgatcaaccatgaagctgtcgttcacatccaggagcagaccattggggtctgttacatcccgagatgtgtagaagacgctgtgtacaccttgacggcggaaatagtcgaccaaaatatggccggccattccgtttccaccaagtatcagcagtttcatgacaagaatcctccgcgtttcagaatttcacgaatctcctctttggtcatgagttggtgttcagaactgaaactgttaaaggagaccgggggacaattggtataatgttcacgcagacccggtatgcccagggtaggaagaattaccaggtactgctcatcgtaaacaacggtggtcatgctctcgaattcactcatcaatatttcatggattttctcccctggacgaatgccacgttccacaatgctcacattctccacaccggaatcctcaatcagtacttccgcgagatcaacgattttgcaggtaggcatcgtcatgacaaagatctctccgccgacactttccaccgaagctttgaacagcaaggtaattgcatccttcagcgtaagaaagaatcgagtcatactcatatccgtgatggagacctgccctttctggcggatttgattcttgaacagatgtaccacacttccatttgttcctagtacattcccaccccgtaccgtaacaaacttggtatcactgtgtaacaagtttgcatatacaattaatttctcgccgatcgcttttgtcatgccataaaagttggacggattggcagccttgtcagtcgagatatagattactttttccaccttgttctcaatagcggcctcaattacgttctgtgtaccaatcacattggttttgagtgcttcgtacggctggtcttcacacaccggaacatgcttgagcgctgccagatgaaatacatagtccacatgctggcaagccgccgtcaaagcgtccttgtcacgaatatctccaatccggaaatgaagacgcgggtcttcaaattcacgactcatagctacttggctagactcgttccgggaatatacaataatttctttgggctgctggggcagtagttgagccacaagttcataaccccatgatcccgtaccgccagtcacgagtatacgcttattttcaaacatgcattttccctccaagcagaaatttaaccactttactggatacatctgtggctttgtaaccttgcgggcaatcccagtcgctagacatctttgtcatgactttcacgcaatcagcgatgcgcgcggcatccagaccggagactacattgctgccgcaatcgaccgtttccggccgctcggtagttcgacgcatcgttacggtcggcacgcccataatgcaacactcctcctgcacggtaccgctatccgtaagcgcacagcgtgcatgacgttcaagcattacaaagtcgaagaatccaaacggctcgtgaaactccaccagcgggttcatctccagatgcagatgctccgcaatccggatcgctgtacgcggatgaatactgcagatcacacgcaacccgtgttcctctgcgacctggttcagtcctttcataatctccagcaaatgaggggcatgatccacattctcggctcgatgggcagtaaccaggaagtattgcccggacttcagcttgagctttttgagtattttgctggaacttacttgcgcgtcgtagtgctgcatgacttcatagatgggattgcccgttagcacgatgcgcctgcttggtaccccttcactgaccaaatgtttcttgctctgttccgtgtaaggcatattaacggtggagatggcatcaataaccttacgatttttctcctcaggcacatccaggtcaaagcaacgattgcctgcttccatatgaataacaggaacacccatgcgctcagccaatattgcacataatgcgctattggtatcgccaagcagcagcaatttatcaggcttttcctgcaatatcagatcttccatctgcataaacatcgaggatagctgtcgtcccagagtggccgcttcatcctgaagaacgtaatccggtgcgcgcaggcccatttccttgaaaaagagaccgctgagactttccgtgaagttctgtcccgtatgcaccagaatatgtttggacgcgtactggtccagcttggagatgatcaggctgagccgtatgatctcaggtctcgtacccagcaccgtcatgatcttcatcgtaatccctgccttcatcttgtattggaacccttgcgccctgctcggctacgtcccgctttggcagatttgcgtctgcgactagccgatttccccatatgtggacgcggtcccttcgttgtacgggttctccccttacgtctgcaagttccggaagtacgtttcagcccctcacggtctcggcgagaatgaggtgcaagtggcttgcgacgacgtttccgcgttttgcccctctgttgaatcggctttgcagccgggacagtacctgaggcaacaggagcatcgtgacccaatgcgattggaggtaatgaggaatgtggcaacgcctgtatgacggtcagtgggaataatagtgcccgaaccgtagtcggctccagaaccagtacagtgcgcagtcctccctccccatgggtatacacaggtccattcggaggttggatataagcaaaccatccgggaaaacgcaataaccactgtgtcaccatcgtatgcagtttcgttcggtaggtttcaacgccgtagagcctttccgcttctgtccgattactccaccccgtattcgaggccagctctgcatcattcagcaaggttgttgccaaggtgacaagcgcttcggtatcacccggtggggccagaaatgcatcactgcctacggattccattaattccttcagtccaccctgagcaaaagcgatgaccggtttggcaaaatagagaccctccagtgcggtcatgccaaatccttctttgaccatgcttgggatgaccaggatatccatcgcggtatatgccagagatacgttctcttcaaacgtagtgaaggtaaaccggcgtgaatacccggattttttcacccgtgatacacactcgtcgtaatactttttatccgatggtgccccgatgatccagaagcgacaacgcgaatgtgtttcacagatcctcaaggccatatccacaaaaggtttcaaccctttggcatcatatataaatgaagaaatataaccgatacaggtctgcgatgatttgaaaccgagctccttacgcttgcgttcgcgcagatgaacccagcggtccggtgctggtagcgcgggttcccaagttggggagataatggtcactttgtcacctatgccggcttcgtggaatggggctaccgctgtctcggatataccgataatccaatccgcgtaacgcccaatcatctggattgcctcgtttgtatgttcattcgtatgaatgatctcggtaatcttccagatgaccggaatctgaagggactttgccgctacagccggcatcacattaacgcaggtgttcgttaacaccatatcgggagcagtctcccgtattagggagactgcttcctgatacgctggtgtatgacgaagatgctccgcatcatctgcaatgcccaggtaaggtgtgtacacaccgtgaagcatcggcagagtgcatattttgacctgaatgccgaatcttcgcgcaaggcccgcaagcttcccctcctgaggggctacgagcacacattcaaagatcgtaccgatctctctcataaaatgaagtagcagcttctcggcacctgtaatgctgcgagtattacacacatgtgaaaataacatcagctttggtttcgttgccatggccgcacggaccctgtacacgggtatccgatacagggtactgtgcacacctcctcccagccagaattaagggaatatgatggttaacatttcattaattcttttgccatacgtgtggtctttcagtgtacgttcgagtccacgaagtgcaatctcacggcgttccttttcatgagtaagataatattccactttgtcgagtaactcctgcggcgaggaatatgtctcaatctccacacccggtttgtagaaacgtgcaatgtcatcccgcgcgtcggtcagctgtagcgtcgtggacgcggcaatctcaaacgttctcgggtttggtgaagctggcgcgattttgaggtgattattattaacggaatcatcttcgtgggatcgatgcaggttgatgacaattttggtgccattgtacacatcattggtctccggcggactcatccagcgaccgagttcaatcttctcgccataggcagtatagtcaggcagacggtcccaccagattccgttaaataccgtattgtgtgacatcaactgaggcatgatcggattgaagaagtatacccggttccagtaggccgagccgataaagctgacatcccgttttaacggggaaggagttgtaattggaaagtaatgattagtgaatgcggcaaaagggaggtagtgaacggacgcgcagccgatttgtcgatatagatcgatacagtttagttccaacgtgaagacatggtcaaaatgtgtcacaatatccagcgtcatatctgtatagtacgggtcatccgtgagccagatcgccgtctgaatgcccgcttggcgaatcgcatcgatatgctcgatggggatatccattccgtccagcacaagcacaagatcaggacgcgtctgcagtgcaatttcagaaaccggttgacgcggatcagagagggttacttgagctaccataccctgtagcgtggccataatggcctcatccaacggggagtaagggaagcctttacccgaggatacatacagcacgtgaagctgtcggaaaggcaacggttcctgtgcacaattcactatatagttggcgcgaccgcgcagatatccttcttccttacctgcgtcatatccggcatgttgcccatttttgcgtgcttgatcagccaggctcagtacgggtgcatgaacctttttggttttacggtgtttgagagacataccgccactcctttattttttgggatagtgttcttgttaatgctgcacttcagacggggattacaaatgttccagcaactgaccgatccggcgagtgaatgtatgctggttcatcgtggtgagaagtccacgccacgccatcgcctgtcgttcttcttcatgcttcagataatagtggatcttgcgctgaagttctgctgcgttggtgaacgtctcgatgtcatatcccggcttataataacggggtaaatctgcacgtgcatccgtaatctgcattgtgccgcaggcgctgatctcatacgttcgtggattaatcgagtgacctttaagatgatgtgtattacgattgtcttccccattctcgcaagtccggtgaatgttaatgacaatcttggcgccattgtaataatctactgtctctccaggagcaatccatccttcgtggatgaaacggcctagtacatcatagcgtgtcaaccgattccactggctacccgcaatgaatacctttttgtccgctagaaaaggggccagctcatcaaacaaggcaatccggttccagaatccggtaccgataaaacaaatgtcgtgctgatgctgcggtgcggcgcgccgcggttgaaacatgcctggattcaccgcgagtggcatatagatgacctggttcgctccatgtcccagatagaagggtacggcggcctcttcatgcgtgaagacgacatcatagtgctggcaaagggacgttgtatcttcggtgaaatacggatcatccacaaaccacacggcagttcggataccgagtgcacgtatgccattcacctgctctacatgatctgcgggaaatacatgcagaccattcatgacgagcacaacatcgggccgatgctgactggcttcctgcaacatcgctgctggcgatccaacaacgcattcacgtacagattgctgcagagccaaggtgacaccttcatcgatggcatcgaatccttgcgggatatataacaccttcatgtcccgcagggtcggttcaaacatctgcacccgctccatcatggcttgacagccgccaaatctgcggccttctgcatatccgccgcggtaagccgtttccgcttcggtcagcggacggtgccttcgttttgccacattattcaccctgtcttccttcaggagatctcacttccagactctccccgagattggtcttccctctaaaggatatgcctcggggtcagatgcatcatggacgggtgtcctgcaaggcgcaaaattggcgcatgccctccacatccgcctgtacgggcatgtccgcttttgcggcgatgcaaatagcccggagggatctgtcccccgggctaactgttatacaggtatgattccatgcaggaataatccggtctaatcggttactgtgctttgtacgccagctgatgtccgtcctcgaatcccttggcgaaacccgcgttgaatccctcgttgtacgcctcgttgtatccctggctgtacgcaccgtccgggtttggatcggtaggggtagccgggacgactggttgtacgggctttggactccggtgccgccgtaccgcacgtttcttttttttgagccacgcactgcgtcctttaagtggacgtttgtgaagaacacgtttggctctgagcgcacgcagtttgcgaattttgcgcagacgggctccacggattaacaaagctcttttggttctcagtcgtattttcttcttctttaacatgtcaacattcctcctgtatgtcccgaacgatacgaattgcacacccggggtctttgagccacggcaagccaggctccccatgctggattcgggccagcctgattcccgtaaccatacgagacatttctgcctgatagcgactcagcaaacgaatgttttcggccagactgcgggcggatacttccgaatgagcggttacactggctacactgtccagaatgcgtgccagcgcctgctgactgtgtgcaatggattcaatgatcgccagtttggcttcctgctcacgccgcatcagactcattttcccatgtctcccagatccatgccgccaaacatgccaccgtccataccgccgccatcttcgctatcgttctgcaccatcaccgctttgagattgttgcacagtccggtctccatccgggttaatccttccagcaattccaccagctgatcatgcattttaagcggctcgcctacctgatccccatgcgtcagaaaggtatccccattcaaatgattcagcgtccagttccgtaccttctcggcctcaatcgcttttgcctccaggatcagggcaatattccactgcattttggctgctgcgtccagcatcagaatgaggctctgttctctactcatgttccttcacccgccttccgggcttattcttcttcttgaaccgcgatctcccgcatgacttgggtcagcgtctcggctacagcctcttccagatctgcaaggccccccaagtaagagataatgcttttgttgatttgcccagagctatccagcagaccgtcaacgccatccaactccggttcgatatctggcaaatgattgatgatttcagacatgcgtacagcgacttggcgtttggcatccagcacacgtgcgatctgctggtgagagtgtgcaatatgtgtgatgatttcatcgattttgctctgcatggtcctcctccttaccgtcacggcctgcttcacccatagaaaaacccggcctatcagcatttgcctgttacagcatatgccgggccgggatcgtcagttactacagcttgcgcctatatcgtcagatgacataactccagtcggaagaatatcgactgaggaattggcgagtacgttcctgcttgggacgtacaaacacctcctccggggttccttcctccacaacggaacctccatccatgaaaacaacccgatttgccacctcacgggcaaaccccatttcatgggtgactacaatcatggtaatcccctcttgagcaatggagcggatgacagacaacacctcacccacaagctcggggtccagcgctgaggtcggttcatcaaacaaaatcacttcgggattcagtgccaatgctctggcgatgcccacccgttgctgttgtccacctgacaacatacttggatactcattgattttggcagacagtccgacttgttcaagcacacgcaaggcacgcgtgcgggcatcggctttggacattttctgggcaataattaatccctcggtgacgttatccagcactgtcttgtgtttgaacagattataatgctggaacaccatcgccgtttttcttctcaactgcacaatgtcatgtttgcgtgcatgcttgcaatcgacggttaatccactgatctgaacctcgccctcatcggcacgttccagaaaattgacgcagcgcagcagcgttgttttacctgatccactcggtccaaggattgctacgacatcgccctgttccacggtcagatcaattcccttcaatacttcctgcttgccaaaagttttgtgtatgttggttagtgtaatcatgacacgcctcctttgctgtacacggcaacccgacgctcaagcagagcagtgatccgctcggcaatgatggttagcccccagtagataaacgctgcggcgataaaagcctccagaaacttcagactgacggatgccaccacatccgctttaccgagtatatccatctgagacacggtaaaagcgagtgttgatccatgcaggaacccaacaaacatactgcacaggttaggcaatacagccccgatcgcttgagggatgatgatacgccttaaagcctggaatgtgctcatgcctacagcgtgagccgcctccatctggccgatatccacagcaagaatgcctgaacggataatctcggacatataagcgcccgcagtgagcgagaaagcaatcagtacaaatactagaattggaatcgacgaggattggaaagcccaaccgtaacgttccgccagcttatcgataatcatcggaatgccgtaatagatgagaaatagatgcatcagcatcggtgttccacgcaggaatgaaacgtagaagtcagcaatgcggtgaatcaaccgcacgcgataaatacggatcagagccgtagccagaccgattccgaagcctgcaatcaacggaacaatcgtaatgacaagtgtcagtggcaatgccttcaggatttgaaaaaaagatgtatagataaactggagatcaatagacatatgctcaccccgctattcgtttcaggcgtttggctcgaattgccggtttgtgtacgactctcttgcgttcatgacgctggagtctgcgttctgcaaaggcaaatcctttttcaagcacaataacaatgacataatagaccacagacagactgatatacacttcaagtgcatgcgatgtagccgaaattaacgtctgccctctgcccaccatatccatgacaccaatggagaaggccagagacgtatcctttaatgaaccgattaacgtgttagccatgttcggaaaagcaacaatcagtgcctgcggaacaacaatccgccgaaaagactggaatgtggtcatacccgcagcataggctgcttccgtctgacctttatccacactgcgcaccgctccgcgaaagatctcggcaaaggatgccgcatcactaagcgcataggtcacaatgacaaataacaacgggtcggttctcgacaggtcgatgccaatgggtttgagcaactcaggaagtccgtaatacaccaggaacaatttgatcaggatcggtgtgccccgcatgaatgagacgtacagggtggccaactggcttagtaccggaatccgatacagccggggaacggccagaagcacgccgcccaccagtccgagcacgatggaaccacccagtacaatcagagttatatgcaaatatcgtagcagttccgggatgaaatccagaaccaatgacagatcaaatgattttcccattaccgctgcacacctttctcagactactcttcaaccgtatagtcagctccaagccactctgtgctcagtttgcctaacgttccatcttctttgatcgctttgagcgcttcgtccactttggttttgagctcctgctcatctttgttcagaatgaagtacactttggagttggagagggcatctcctaccgttttcagctgagcatcaaccgccttattctgataatcaatggcaaactgcgtgctgatggtggcatccacccggcctgttttgatctgggtaatggtatcctcacccgctccggaataaacgatatcaatcccgttgccgttcgctgcattccatttctcagcaagtaccgccgcattacttgtagcaccaacaatcagttttttccctttgagatcctcaatcgattttacttcctcatttttctgacttacgacaattttatttggaaaaatattataggcttcatcattaaacaggaacttggcctgtctctcatcattgacttccatctggtgagcgatcaggtcaatttttttcgtttccagactcagcagcagatttttaaaatccatcgtgctgaattcgaattcatattcaggcaaacgtttgtcgatctcccggatcagttccacatcataacctgttaacttgccattctcatcaatgaagcagacatttgggaactgtgtacctgttcctacaatgatctttttcactttggtgtcgcctgctaccgaagcagattctgaatcattacttgcagttcctgtgctgcatccagccagtaccgccagcattgtaatgaacagcagagctgtccggaatttttgaatcccccgttttttaaccattcccaatctcctccacaggctgttatcacagcgaatatgatgtgtactcccattcctcttcctattaacaaaccattcttacttgtatagtcggaattaggttgaacaaagaatatcattacaagtcatcatagggcaataactaaactaataggacatcctgatatggttataggacttctctatagtacaagaaaaagccatcccccatatcgattggcggatggcttcttcttgtatgactctcactggttataccattttggcggtgcatcacttggtgtgtacactactcatctatctgcgactcgcccatttaattttacgtgcaacttccactcgctgtaattgtaagagaccgatccgttcctcgaacttcttgcgttcgtccatggaatgagcggcatgaatctggtggcacagacctgtcagtttgctgttgatgtaatcaaaccgtgtccatagttcctcttcaggtgtgcgttgctgctccgtcgccgtctgaaatattttgagttggcggataagggattgttgccattcctgatcctgaatttggatggcaaaatgcaaaagatccagatagtcatcaatttgcaacgaaacgccgcaatcagatttagtgttcatcgtcgtctctccttatttcagtacttggctggaatccattacttctatcttacaggaacaagcccactgaaagcgagtactgaacgattaaatttcgggaaaatttttatttttttatgttaaaacagctttacatttccataaagaccaatttggcaggatattgatattggtacatatgaaattggtaataaaaacccgcgttaaggaaaaaatttctttcctcaaaacgggtttttcatcattttatatataatattaacacatatcaaattagtcattttttccatctcgctgctgtctggtcatcagtaacatgagaaacgagatgataataatggaaacagtccatgcccaagccatggtctgattgcccgaatccacagcgacatagattgccgtgggtaccgtttgtgttttgcccggaatattgcctgcaatcataagtgtggctccgaattcaccgagtgcccgggcaaagcccaggatgaaggcggtcatcaatgctctgcctgcgagcggcaaggaaatgtaacgaaagacctgccactcattcgccccaatcgaacgacccgcatcctccagatcacgatccacaccactgaatcccgatttcatcgtctgatacacgagtggaaaagcaaccaccaccgaagcaatcaccgcagcccaccaggtgaaaataaccggtgcggagaatatggcttcaatccattgtccaaacagacttttacgccccagtatgacaagtaacagaaatccaaccaccgtcggaggaaggactagcggcagcataaatgccgtttccagcagaatctttccccgaaatgaagaacgtgacatcttccaggctatcgcaattccgagcacagtggccactacgctggataataatgcaacctgaagcgataagcgcaccggtgaccagaatacggaccagtctatggcgttcacattcattccggaattgtgaatccgtatttcgcgaagatatcgagcacttcaggggtttgtaaatacacataaaattgttcggcctctgtacggtgtttagttccttcgataatgcctattggataattggctggtgtgtagctgttcttgtccacctcaaacgcaattttcacctgatccgaagtaagagcatccgttttatatacaaatcctgcatctgcattgcctgtctctacatattgaagaacctgtctaacgtctttcccctgcacaagtttactttccagttcatcccacagcttggcattggtcagagcttccttggcatatgttcccgcaggaacactttccggaatcccaatggctaccgtcttgatggagtcgctggtgagatccgtttcactggttactgtgtgggtcccatctgctggcactatggccaccagtgaattctgtagcagattcttctgatcgcccgatgcaatcaggttttcatccactagcgcattcatattttttgttgccgccgatacaaagacatcagccggggcaccctgttcaatctgctgttgcaaggcacccgaggcgccaaagttaaaattaagttctatataaggattagctagctcataattggtttcaatctctttcattgcatcggtcagactggccgccgcagagattgtcagatctaccgtttcctgcggatcggtatttcctgttgatgaactttcacctgatgccgctggcgttgaggttgtttgttctgcacctgtggatgtatccgtagtgcccgtgcttgcgccgcaaccagccaatacaagagccagtcccagtgacatacttcccaacacatatccgattctctttctcattcatttctcccccaacgttatctttagatataactagttataattgattatatctaattatacacaagacaaaaaaaatgggaaggtgattaagatcacatttgatttttgttatctgtcctatgcgtgtattgcgtgttctcaggtttatggcatccctcaattaatgatatagtacaagaaacattcataataaaaccataattgctctatacctttgaaggaggatcttcacttatgacggaggagcaatcctacacaaccgaagaaatatccaagctactcaaaatatcgaaactgacggtctatgacctgatcaaaaaaggagacctcgtcgcataccgtgtgggtaaacaaatgcgaattgatgcaaccgatctggaggcatataaacgtcgctccaaacaacttcagtcctcagcgcagcgtatcccgactcctcatcagacctcggcatcagggacccagccaggtcagggtgattttcagggaacttccttacaatcgactacacccgttgggtctacgcatgcgattactccagcgagttctgctcatgcaatgactgctgtaccacggcatctggtcataacaggtcaggatgtcagtctggatattctaatgcgccatatggaaaaacaaactcgggacattcgtccgctacgttcgttcatgggcagtttggatgggcttatctcgatgtatcgcggtgagtccgatctggtcagcacccatctgctcgacggagataccggtgagtataatctgccgtatattcgcaaaattctgacggggcggtcctatgttgtggtaaacctgctgtcacgtcctgccggactatatgtacagcgtggtaatccgcagaacttacagaattggaccgatctgagcaagcctgaactgagactagctaatcgggagaaaggttctggcgcgagagtattgctggatgagcaacttcggctgcatggaattcctgccgcaggtctgatcggatatgaaaccgaggaaaccagtcatatgggcgtggctgccaaagtcagttcaggtgaagctgatgtcggagttggcattgaaaaagctgcacgacttgtgggtcaggttgattttgtcccgctcactcaggagcgctatgatctggtcatgctgaggaagcaaggtaatgaagcctggaccgaattggtcctgcggattctccaatcgccggagttcaggcaggaactgcaatcattcgagggatatgatgtatcgcgaacaggtgaaattttgtacgaagcatagttatacgagatatagccaaaaacacccatgcttaatggatgttgcgcatcacaattacatcatgtatatacaaagcaccttgcaatggctgcaaggcgcttttggtgtttcattctataaataatgcatgatatggatgattgaattttttaatgtggcaaatcgatctccaggatgaatacaccatacgcgggcatgttgatctcattctgaagtgttgtacctgacagtaactcttttgcttgcttcttaagcttaatgggtacttgttgatccgagtagttgagtaaaaatacataagctttatccttaccggaacggataccaagctcaacttcggacggtacctctaccaggtcacccacaggtgaagatagctctatttcttccaggagagcatctacgaccggttcattgtaagccgctccataataccatacttgcccctgacctaccgtacgtttggtcaatgcaggactacctgcataatattcagatgtatactcagccatgacctgcacgtcagcatgctccacataaagaacttcgttaaatccggccgttgacgttccctcctgaagtcgctcactcgccccattccattgcagtttggctgctggaatggttcctttgattaaggtaaagtcctctacggttacaccacacaactcagcgacagccccagggaacggtctcatataacaatgccccctgagatccttatatccagtgcgcgcaccgaaaaacagagtgcctccttgactgacataggcttgcagaagttctgctgtctcgtctgtcatgatggccggatgagcatagatgatcaccttatattcggataactcttccagtgttgtcgttggttgcagtgtaaccatgtccgtcggaatatgacgatactggagctgtttataccaggagcgtacactctgttgctgaagcgggccgtgccactcatccaactctccatcccagatgttatcgtaatcctgtaggatcgcaacatcggcttgatatgtagtgcccgcaataacacgcccgatcttggcaaactctttccctacttgtgcaacctcgcgtactcttctgttaggttgattatggtaatcattgatgccatgccagtacatctcggtgccaaatgttgctgtccgccagcggaagtagacgagtagatctgttccgtgaagaacagattgatacgaccataatcggagctggcccggtcttggcgtacccatgcctatactgtcaacccagcctcctggcccagactgttgttccatgacgcagaagttcggtgacatgttacgtacgttcgacagtttcatgctccaggcccgatcttgtaatgagttatcgtctgtccctgggaagatcgtggcaaactgcggatacgaatcataggagaagaaatccaatagctcctctgtcatttcatgattatccaagtgtccaaacgtaccatttgttgtgatccaatgttccgggtccagttcccgaatgatgtccacctgaagcttggcaaatgaaatggtattggcggagatgaatctcttttcatctagtgccaggtgaggattgggcgatgaactgaccatatttcgggtaaggtgaacttgctcccagtcagtataggtctgactccagaaaacggttccccatgcttggttcagattctctaacgattcataacgatcctttaaccattcacggaaggcgacatggtccgcctcagcatagaaaatatccatatgacaattgaattcattatcgatctgccatccaatgagagccggatgatctttataggcaatcaccatattgcgcacgattttttcacattgctgtctgaagattgggctgctgtagttggtatgacgccgcatgccgtgttgatacaataccccgtccttatttgcgtttaatacttcaggatatttggatgttaaccacgctggtggagttgcagtaggtgttcccaaaataacacttaaaccgtattgatgcgccagatccaatgccttctggaaaaaactaaaatcgaactgaccttcttcctgttcaaagatggaccatgcaaattcagccatccgaataactgtgatattcatctctttcattctacggaaatcgtcctcccacaacgcttccgaccagtgctcagggtaataacagacccccattttcaattcatccatttggattgattttgccacctttaattgcccccttagcctgccatattgcctccattctattggaaccttcacatataataaatgacaagattatgcgacttatattaaaatattgtcattgtccaagattcaaataacagtaggctgaatctatttcagttcactacataaaaatattgcgtttaaatggaggatgcacgtgaaagaacacatctttctccccaagccggttttccccagacatgtatgctttcccgattttattggagggtacagtgactttccgaaacattatgtgaatcgggaatatcgaacgaaagatatcaacttggatcattgctataatttgcaccttgtacttgaaggtaaaggattcctggacacgggaaccactcgttatgagctaacacgagggcagggattcctctacggtcccggtctcagacaaacctactattcagatttggatgacccttggagtattcgttggattcacttctacggtattcgtctcgaagaactgttaaatggaaaaggcgttgacgagccctggctgtttcaatgttccaactttccggtggttaccgcgctcatggatcgattactggggctaggcagaggctatcaggtggaagacgagcatagtgtcgcagctacactctatgagcttctgacccgattgcaatccgcagcgagccaaatcaatgtttctttaaatcacacttcagagcgaattcgagaagcagggaattatattcgttcccatagtaacgagcacattacactagaccacgctgccggaattgccggatacagtacaacatactttagccgcaagttcagtcagacgtttggcatctccttcccggaattcctcttggaatccaggttactacatgcgaaacagctactcgcaacaaccaacctttccattaaacaaattacgctggaaacgggattttcacagtcaagctacttcatccgctgttttaaaacccaggaaaacgtaacacctatgcaattccgtatgatgcacaatcattcgttataggcacaaagttacttcctcgtgctgacgcaaaagaagactctgcatacaacatgcagagtcttcttcgctcatttttcataaatgctcatccgtgtcttcgtcctcgtgctctggatggttgattctttattcgtattactctcacgtacgccagaacagtccagcttcatcccgttccacctgctcgagcacattctcaaaatcagaacaaggtgtaataacatctaccggattccagctgctctgttcatctctggcatacaccttccactgattttcttcccagtaaaatcgggcaatgtgcatcttgtcccattgataccgttcctcggcgggtctttcttcggtcaggatcagttcattgtcattcatctcatacgtcaacttcaccattgtacgcagtggcgcgggtaccttctcgtgaatatagccgttcattacggactgaattcttcgtaacgtaaacaagtccagcatgaaaatgcacatcctttcagcaaaatgccccccttgatcattttaccaactggatttcgttacgccaggaatctgtccttgatgggccaattcacggaatttaatccgagacaccttgaacttgcgtagataaccccgcgggcggcctgtcacttcacaacgattctttagtctagtcggagatgcattccgcggcaatttctgcaaggcttcgtaatcccctttctccttcaattcccggcgcaggtccgcatattttgccacgatcgcctgacgttgcttctcacgtaccacttttgattttttagccatgaattacagctcctttatccattaaatttatgtttagaacatcaacttccgagttatacggcttccacaggccatggcagtggattgtcgaaatggccccagtctcccagcatttcttcatcactgagcaggcactggtccagctcgtcttcaatgctcgcacgctccatttcgatcccaatcatgacaagctccgtctgacgatctccccactgggcatcccatttctccagaacatccggctcgttacgtaaaatctcttctttgtccgcttccggcaacgccgcgacccaatgtcccgcaggaccaaattgaatggatggtcccgcctgactgagacttgccgcaacatccccttcagccgcaagccatactaaacctttggcacgtaccacttcttccggccagtaactcatgaattcagccagacgggaaggatggaatggctttctccggcgatagacaaaggatccaataccatattcctcggtttccggtgtatgcgactccttctccagctcctgaatccacccagcggacatgctcactttctcaaaatcaaagcggcctgtatttagaatctcggacggattcacctgtccattctcggtccgaatgatcttggcgttaggctgtaacttgcggatgatactttcgagcttgttcagctcggtgtcatcgaccagatcacatttgttcagcagcagcacatcacaggtttcgatctgatcgatcaacaagtctacgacgtcacgggtgtcctcatctccggtcgcctgattacgatccagaagactctgtcctgatccaaaatcatgccagaatcgattggcatccaccaccgttaccagacaatccaatcgggccagactagtcaggtcaatacccgactcctcatcggcatatgtaaaggtctgtgcaactggaacaggttcactgatgccggtggattcgatcaaaatatagtcatacttgccttcgttcaccagcttctcaatctcttgcatcagatcatcccgcaaggtgcagcagatacagccgttcgacaactccaccagcttctcttcggttcgagacaaggttgcctcccccttaaccagcgctgcatcaatattgacctcactcatgtcgttaacgattacggcaaccttaagcccttgtctgttgttcaacacgtgattcaaaaccgtcgttttccctgaaccgaggtaaccactcagtacggttaccggaacttgcttttgtgtcatagaaatctactccttatatgtgcagtctgtgtaattcagactttaatagtaattattacgattaacaacaatgactataatcctgttagacggtcattgtcaaactatttttgatttcaacctgcaaaaatacaaaaaaaggctgacgaccagcccttgcactttcgcatcctgaggatacgttttggcaagaagtgagtcataaacctcctctgtaaatgttctttagttcaatttatatagccaccccagatctggccttattgcccgcttccatccgttgcctgaacaccaacaccagtaccatcgctgcaatagacagcaacgtgcagatcataaacatggtcgaatacgaactcacttgcacaatgagccccattgccagtccacccagagagaatccgaggtcatacgaggacatgaaaatccccatgagtacatatctggaatccgcaggcaacacaaaagacagatatgtggttaatgtcgggtacaacagtgccagggcaaaaccgctgaacactgcggagagatacaccaatggcccgatgatctccattaagctgagtaactgggttcccagtgctgcacacagcattaaccctgccatcagccaggtattccagctaccgtcggacggaatttttttgcgcaaaataaacctgcacaggattacaactaatccctgaatcgtcaaaaatacgcctgcactcgccattccggtggataccatatacagaggaagaaaggtcgctgtcgccccaaagacgcaggacgcaaacaacatcaccacactgctgatcagcagcggtgtactgcgccagatgccgccgaatgaacgaaacatgtcacccaaggtgtacgatttgttctgcacggtactccgcggcagatccacattatatccaatcagaagtggcagcgccgccagtccgatcatcagcagcgtaaacgccagatcactggcattttcccagatttgtatggcaaggatcggaatgaccagagaaggaaccatcgtaaaaagggtgtacatggacagcccttgtgcccggtctttgtcctccagcttttccacaatgcctgcctgcatcgtcatggagaaaaaggccgtagccaccccttgcagggctcgcaaccacagatacgtctccacaccaaaaacaacaaataacagcaacgtgcccgcatgtaatagcaataaccattgcatcactcggagtggcccatgcttacccagcagttgtgctgcaaaaggtctcaagagcatacaggtgaacatatatgcccccatcatcagaccaatctcagcctggttcaatccggcggcttcgcttcgcaaaggcagaataatcgtcaaagctgaattcgctgcaaaaaataaaaaggccagcatataaaaccgtataaacgaaaaggataccggatttaatttcccattggatgttgccgtcattgaagacttcaaacgttcgtcaccactttctcttctggcagtcaactcacagatgtacctgtaacgggtctccgccgttcataggcaaaaacgatcattaccgctcctaggatagcacagatcatgtacataaatgaataggaagagaagtcagcgacgggacccataatcacaccacccagagaaatacccagatccgccatcgcgataaataacccaatcaggacgttccggttcagtttaggcaagacaaaagataaataggtcgtgagtgtcggatacaggatcgcctgaccgattcccatgaatacagcgcccccatagaaaaagaccaccccgcctgtcacggcaaaactgacacattgcgcagcaacggcgagcagacacatcgtacccatgatgaaaggagaatgccaactgccatcggacggaatcctttttcgaagcataattcgagccaacaccactgttcctgcctgaagcatgagatatacacccgcattcccgtctggtacttgactcgcatacagcggaataaaggtggtaatcgcgccaaatacaaccgaagcggcgagcattaacacactgcaacgaaataaatgtggattcttcaccaactgaccaaaggattcccacatgctcacgttctgctccaaaagattctcagcaggttgttccttgtttggttccattttggcggtatatccgaagacgcccgtacagacggcaatgccgatcagaaccactgtaaaataatccataccacccgtctgccagattcctaacgcgataacaggccccacgatccccggtatataactgaatagcgaataatacgaaattccctgtgaccgatctttctccggaagtgcatcaataatgccaatctgcaaggccatggagaaaaccgctgtcgatacaccttgtaaaatacgagcaaccaaataacctccgagtcccgtaaaggtatataaaatcagcgcaaatccattgatgatcagaatcaaacgcaatattttaatcggaccgtgcttttgaataattcgacctgcccaaggtctgaagaacatcgttgtaaacatataagcgcccatgatcagaccaatggtggtactactcgcgccaagatattctccctgcaacgggatcaatacattaagaatggcattggcactgaaataaagaaggaccaatatgtacaaacgcagaaaaggccaagacatcgctccactcacaatgggtgttccccctaaaatggtattaaatgcttcaataatcgcttcgcataatcggactgtacgtccttgagttgcttggtcggaacgatctctacaacctgcccctctctgaaaataattaccctgtcgcaaatataggctgccgcctgtatatcatgcgtgataaaaacatagctcagcttgtagatttccttcagctctttcagtaattgcaacacctgaatctgaacagacacgtccagtgaactgatcgcttcatcaaacacgataagtttaggggcggtagagatggccctcgcaatgcacactctctgagcctcaccgcccgatagttcatgcggatatttggatctataagaagggtccagttcaacttgatgcagcagctgatccaccttccctgaggtatctttatcctgtcgtaccttttgctgagcttgcatcggttccataatggcagtttccacggtaagaaatggattgatggaggatgtatagttttgaaaaacagcgctgaggtttcccatccgtacacgtccatcctgtacgtctttaccatccagcgagatcgttccacgatccggccgttcaatgcccagaatcagacggcccaacgtcgatttaccgcttccgctttcaccgatgataccgagacactcgccctgctggcatccaaaggtaacttgtttcaaaacttgttgtttgtgcttggagaacaatccgccttggttatatgatttttcgataccttccacctttagcatctataagtccccctgcatcaacgccttaaaatgattgctcaactccaatcgggtagagaccagatactgcgtgtaggcatgctccggttccgtcaaaacagaatgcatgctgccacgctctacgatgcttccgtctttcatgaccatcacgtcgtctgcaatcttctgaacaacgccgagatcatgggagatgaacatcatggaacagcccatgcgttcgcgtaattgaatcaattgctccacgacttcatattgagagatcgtatccagtgccgttgtcggctcatccgcaataatcagatcaggctccagcaccaatgccagtgcaatcatgattcgttgcagcattccaccggacagctgatgtggatattgattcataatctcacgcggatgtctaagcatgacgctttccatggcattgatgattttccgttcaatctcgcgggtgttccagccaaaatgctgctgaagcgtctcccgaatatgaacaccaatgacacaggaaggatcaaatgcactcatgccattctgcaaaatcatacatagatgcttgccccgcttacgcctcatctccggttccgaaagctggttcaggtcttcgccctgaaataacatcgtgcccgattggcgaatccacggcttgttcagtcgcatgatggccctgcacgtgacggacttgccgctaccactttcccctacgatggccatgcagcttccctgtttgacttcaaatgaactgttatgaatgatcactttacctgtattggtgtcccagactttcaaatgttcaacctcgactatattcataagtagtctttctcacctcactttcgtaagacttgtcagacttaccttgagaggtcatcaatttggggtccagagccacttgaagggcatccgatagaaaattaaaagcagacacgaccaccacaatggccaggcccggtgccaacatcaattcaggtctggagaacatgacttccctcgcctcattgagcatcatgccccactccgcatgcggagcctgaatgccgagccccagaaaggaaagaccggagatctgcaacatcattgaacacatggagccactggcaatgacggcaatatcagcaaaggtaaccggaacaatatgtttggttataattctcagattaggcgtgccggaggctttagcgaattttacataatccatatcggagaattgcatcacagatgttcgaataacgcgggcaaaccaggcccatttcatccacacaaaggcaattaaaatattctccagtcctgcacccaaaatgccaaccaccgccagtgtcatcacgtatccgggaaaagacagcataatgtcacagactctcatgatccatgcatccacttttcccttgaagtaacctgcgatgaatccaacaatggccccgatcagaacagatagactgagcgcaaccagaacccataacacacttggacggatgccatagataagccgggataatacacatctgcccagatgatcattgcctaatagatactcccaggatgaggaggcataacgaagcttcatgttcacttgtcctggatcatgcggcgcaataagcggagccagtacgcccgccataatcgtgaccataatcactagtaaagaggtcaacgcaagcttgtctttgcgcagatttttcaatattcgcatcagtattcctttctcaaccggggattcatcgccgcattaatgatgtcggataacgtgttaaacaagacaaaggtgacagccaacatcagaacatacgcctgaataatcggaaaatccctgcttaaaatggatttcacgctgagcctcccgagccccggccaggcaaatacattttcaatgactaccgtactgcccaacacaattgggatcgccatgcaaaagatggacacggccacctgtaatgaatttctcagaatatgcagggttactttcttctcactcagaccgcttgcccgtgcatataacacatagtcctcattcatattgctcagcatggaacttcgaaccgttcggaaataaatgcctgtataactcaccgtgatcacaatcaccggtagaatatagcttcgatacgagtccatgccactggtaggtaacaggtccagcttgacggaaaaataccagatcatcatggctgcaagccagtaggacggcatggctgtaaggaaaaaggatacgcctctgaccgatcgatccagcagcttgccttctctcatggcacagatcacacccagtaggatggacagcgcaataatgaataccgatgagacaagtgttaacttcaatgtgttcataaaagccggccccatcaaagaccacacgggttcacccgatacataagagttgccgaaatccaactgcacaacagccatgatccagttcacatactggatcatgaacggctgatcgaatcccaatgccttgttggtctgggcaattaattcctctgtgatctgcggaacttcctgtgcctgtaacacaacaaccgccgggtccaagggagatagattaatcaggacaaacgttataaatgaaatgataatcagtaaagggatggttaacagaatccttttgaagatataacttcccatatccatctccgctctatttaaattgaactaaacaatatttacaatacactccgatgacagaacaaccttccgatcgctgttatccccagatttttttgattccttttatatagggaaaatccggggatagcgtatgcttccgatgtagctttcttgcagaaagcttgtaggcgaacgctccgcttcttcaggttctttctgtcctctccgttttgtgtaaatgtttagttcaatttatatatttaaaattcattttttcaaatggcagttcatattgggtctgcttgaatgagattccattaagattctcgggagcgactacggtgacacgtccgttggtaatcgggatgaagactgcttcatcatggacaatcttcataatgtcggcatacagagattggcgtgaagcctcatctgtggaaaccatgaccgcatcgattttctggtacagttcatctgcttcggcaattccgcttgttgtatgcttgtatgccgaatctgatgtaaatgcagcaatggtactctgtggatcataggccagtccccaggtttgattaaagagcagatcatattccccggtggctctccgatttgcgatggaagtggactcttcgcccacaatctcaagctgaacacccaattctttcatggaatactggatcaattcggcctgtattttctgtgaagacgagttgctgtcatagtatagtttcatggccaaaggctgaccgttcttcgttctcaccactttaccatctgccaatgtccagccagcttgctccagaagatttttagccatttccggatcatactcccgtttcttcaggtccaccttggcgtaattgacattggctgaaaatagcgtgtccgcaacagtctgtgtcccgttaaaaatatccttactgatcgtttcccgatcaatgccaacccatagcgcttcccgcactgccgtttcctgaactggactattctcgcgactgctattggctacgatcatattggtattcattgcatcacttcggatcacttgataatcaccggattcagccaattggtccatggcttcgacatcgatactatctgctccccggtcatcggtgaacacaaagttgatttctcctttttgcaatgccaggaatgttgtttctccagccggaagaaccttggatgtgattttcttgattgcaggtgcaccaccccaatagtcttcattggcttcgaacgtggcattctcttcaactttatgagcagtaagcttgtaaggtcctgtgccgtggaaaccacttactccgtctttggttcctccatccttgaaatccttgggtgatatgaagacgaaaggtcttgtcatggacaattccaccagtgccggataataggcttccgacagcgtcagctccaccgtatgctcatctataacttttacacttgtgattttggtagacagcttgatccaggcatgtttttcggcattggcctgaacggcatcgatattttgtttaaccgcctgtgcgttgaacggctccccatcatggaatttcacatcttgtcgcagatgaaaggtataggtcttgccaccctccgaaatatcccatgattcagctagcaatggcttgattccgtcaggtgtgttttccaccagagactcatatatcatcccttgcgcaggcatggaacctgtatacagatgggggttcatatcattaatatctttggcagaagcatagataagttctgtttgtacttggctattggcaggctccgtttgggcgctctctgtctcttttgggctctgtccgcatccggcgagcagcgcaatggcagacaccagcaatagtatagatgtaaaagtaagaccctttttcacaacatttcctcctgatgattaagttacaagcagaccttgtaggttacatcagaccactccgattgcagtaccatcttccgatcgctgttatccccagatttttttgattctcttttccaaagagaaaatccggtgataaatgcgaacgcttcgcttcttcagattggttctgcactctccgttatgatgtaaacatcaggttcaacttgattaatttgagatgtaattaaccctattactcaaagtcaaagtccggtgcagatcatgcggatatcctcttcaaaggattggattgaaaaggcgctggacaagcgctgatccgggtgtgcgtcagccacttcctgaagcttcgcttcaaatctggcgataaattgatcaatcgttggacagctcacatcgagatgtctggctatgccctgaatgattttgatgcggtagtaatcttccttgggcatacgggggatgtccagttctccttcgcggttcatgaacgttttgcggaatgggactgctgaaaagtcgaaatatttccctcccgaatcgggttccgagaatggatcaatcaataatgaggtgtaccgtatgtataataaatactcttgatgaatgacctgcagctgattgaaatcctcgatatcctggcgtgatatactctctaatcgaaccggatagttgtcatccgtcatgaattgaagcaggttaactccctggatatggagtcggtccgtaatattcataatctcctgccactgtgcccgcatttcccgtattaaaacttgtgtaatcggaccctcaggatacatcttgtatatgtatttctgaatattcgatgctccaaagatggcttctaatgagaagtcgttcatgaacaaaggtggatgcacgtacaacgaaatatttctcgtttccgcctccagtggggatcgcatcacttccagcgcaacacccaaacgctcataaccttggcgtagcttactcacctgttcagacgggtaaagagtggaaccgatataaacctttttcttaacccctgtagtaatcacatgatttgacggatgttcgtgcacccaacgggtatctccaaggtaggtagagaaactgatcacttccggcgctgcattccgctctctcatataatgggttaccagtcgattggacccaaacgttggagaaatcaaaattatacatttcagttgtttgatgaattcatcattcatttgttccaatacatcgatataagcatcggtcgtaaccgccaaaatgagtgtgtcccattccccctcaatggtgtcatatcccttgaacacatgatcaacgaaacactcacctgcgagcgattgatgtttctcattttgaatgctgacctgaatacgcccattgctctgttcgagggctgagaatacggacgctgaacgaaccgattgtctccccgtaatgcctatacagcaattgagatgatctttgagcgttaccgcaagctgaatggatgcaggtccggttccgagtatcaggattcgctgaagattgctcatataagcctccttaattcaatgttcaatctgtaatccatttggacgcacttggattcacttgcatacctatgctttttgatacaacgcaatatcaaacacatcatccgggcgcaggatcgtatccaccagcttccatttgctgctgtccgtctcttccatcggataattgaacaacgacttcaactgatcaccgtatctcatggctataaccacctgtgcattcgtcagggcatgcagttgatcaagcagctcatatttaggggccaccgtagagctgaaaatgatatgggttgcttcccttgtataatccagatcctccagtaatgttgactgcaaacgaatcttcaaacccgtgcccagtgtctccactacttttcgcccgagtgtaatcgactcttcgtcaatatcgatcccgacaacctgtgcacctgttcgcttggcgatgagtaatggtgtcatggggaaggaaccggagcctaccaacaatacgttggaatcggaggtaacatggaagctgccgaattctttatcgatacactcttctatatttttgaaataatcggcaatctgaacatccccgttttctaactttaatgcacgatatttctccatgatcgccacacactgggcggatttatttcttaactgccatacaagcaaatccagttcttccagctcggaatgctccaactgttcccaggctgccttattctcctgatcggtcacaaagcgggagtagtcattgatcacagcctccagctctgcactatgctgaatcgtatgatcatacttgctcgcgagcttatcgaatttctctgcaaattcactcaaacatgtctgaaaatggaccaatgtgatcatttcttttccccctatacgttgtctcgatcatgtatcatgtacctcatgcgtttacaacgctccattctgctggagcatctatgaaggctttgccttgagccacgatgccaaccgatccctcaatcgtaatgcccccaagttctgcgccattccactgggccgttactttgatcgcaccaccaggttgcttgatgtactgcgtaatctgcctctgctggctccatgcgagatacgctcctacggaggccgtacccgaaccacaccctctctcccagatcagactatccagctccggaacatagatgagtggggccatttcttccaagtgtgattgatataacaagataccgatcagcttatctcccagggttaatcccagtaatcttgcaagggtctgtgccctcttcttcatcgtatcgtcgaagtcatcgacttcaatcacgatatggatgaactcagcgtaccggatgattaccatatccagctcgatgccttcgtaccggattgttcgctgctcaatctgcttcggaaccggcatagttacctggcagttgtattcatgctgctgcttcttcacatggcacatgatcaattgatcggttccggaaacctccagcatgatgtccatagactcctgatgtgccagtcctgcttcagatgcatggtgtgttgcaagtgccatacaggcattgccacagaactctcctccagccatttccagacgggcagcagcttccggtctcctcgttggttcaatgaatcccacttgttcagcgtaaacgttatcatacgacattagacgagttgcaatatgattgtatttctcggctgcatgatccgttttaaccagaatcgtcatgttttgggtgggactgaacttgataaaatcgatctcctgtttcatcgcagcgactactcctgttcttctttttatctaatagtaattattacgattaaaggtcgagaaaaatatagcacatctttttggggagcgtcaacaaatatttccatttaaaaaaataaaatttcataaaatctttagcttcccttcctgtaagaaaacccaaacagagctgacgcttctgcgccagccctagccatacctacaccatctgataagattcaacgactcgtcgttcctaccccgttctcacttaaaaaagggaatacgaaaaacggttgccgtcgaacggaaccgtttcgatctggatatgatccagtgattcactatactcatcactcttgatgtgcttgcacattgtgcagtgctttctcagccagtgcagccagaagatgtgctccgagcggcagtgcctgttcatccacatcaaagctagggtgatgccactcgtgcgggccagaggtgcccaggaagagaaacaggccgggagcttctttttgataaaaagagaagtcctcacctgctggagaaggtagcggtctaacactattcaatccaatctcacttgcaacttgctccgccgcagatacgagagactcatcgttgaccacggcaggtggtccctgaatccagcgaaccgtagcacgtgtgccataggctgccgcaacacccgctaccacctgattgaaacgctcgcgaatccgtgcacgcactttctcatcaaaggtacgtaccgtgccgtcgagtatcgcttcatccggaataacgttccaggctgtgccgctgtggagcttggtgacgctgattacagcactctcttgtgctcccacattgcgactcacaatggcctgtaatgccgtaacaatatgtgcggcaaccacgattggatcaatgccggcttcaggcacggctgcatgggtgcctacgccttccactttgacaacaaaaccgtctgctgctgccatcaatgcgccttcccgaatgcccaccgtacctacctggagatcaggcttgttatgtaatccgaataccgcccgaacatcggacaatgcgccgctctggatcacttgccgagcacccgttgctttttcctccgagggctggaatatcaaccgtacttttcccggcaaactggactcgcgctgtttcagtaatcgtgcagcaccaattagaattgccgtgtgtgcgtcatgtccgcaagcatgcatctttccatctacctgggaggcaaattccagctttgtctcttcctgaatgggcagcgcatcaatatctgctcttagggcaacaacaggtccgtccccttggcctacttcagcgacaagccctgtcctcagcgcatattcgtctgcaatacggacgccttcctcttccagccaactgcgaatggctgctgtcgtctccttttcctcgccggacaattccgggttgcgatgcagatgtcgccgaatggtgattaaacgttccgcaaattcttccgcccgttcaccgtgaagttcatgctcggggccctgtacttgttgctcagaatgctgcttgggctgttccagatcacttttcatcacatggcctcccattcgtatatatttactgctatattaactgcctaattctatccgattgcagcttcctgttccttggattccagtgcaaattcactcagtccctgctctgccagaatctcacgcaacaattcgaatgaacgaattcgcttggtaaagtcccgtgtagctgtagtcacaatgaactcttccacagcaaactcctgctggaacttcagcagcgcctgacctacgctttccttcgtaccccgggtcacacttggctccaaaatctcgatccgataggtttcgtttgattgacgtccgaattcttccgcctgttccacagaaccgacagtgagtactttcccactctccagatggatcttcaccagcatatgctcgctcgcaagtccttccgcttcctcctcactctcggccacaattaacgatatggctagtgcagcgtagggctcccgtccctgggaacgatcaaattgttcacgatatacacggatcgcttgaagtgctacctctatattactgttaatgaacagtgaaaagacatatggaagtcccagttccgcagccatgcctgcactatcaacactggctccgagcacgtacagctccgctggaatgtcggacaagggcgaagcgctgagacctgcaagtggatgtgatggatcttcaagcggctcattgtggatgtatcgtttcacttgaacaattttctctttcagagatgaggcttcctgaataccttcctgcaacgcctgtgtcgaacgtggtaacccgcctggtgcacgaccgattcccaggtcaactcttcctggtccaagcgctgcgaggatattgaaattctcggcgactttatatgggctgtaatgctggagcattactccgccagaccccagccgaatccgctttgtatacgcaagcaagtgggagatgagtacttccggggaggaacctgcaacatgccctgaatcatgatgctccgacacccagaatcgatggaatccaagctgctctgcccgctgtgccagctcaatcgtatggcgaaaagcatccaccgccgtttccccttcatagatgggagtctgatccaaaatgccaacacgaatactcatatccttctcctccttgattgtgctgaaccgctgttcttgaatcttacaaacaatctatagttgccgcagcagttccccgaagggctctgccaatggcgaatattcttcctttaaagtaacgacgctgatctgcaacgatacacctgctacctcatgtacctgaatggggaacagctcctgattctgcacttccttcttcaccgtaagtcctgggagaaaggcaatgcctgccccttgcataaccagtttcttcgccgtctccgaattatcgacatgatatgtaatattcggcggatgttccagcgagtcgaaagcccggtgaatgcgaagccagtccagtgaaccacattcaaaaaagaccagttgctcattccggatagcttccatgctgacatgcccgctctcaatgaatggatgccctttgtacacatagagctgaatcggatcttcataaaaagcaaccgtacggatcgcaggatgcatgaccttgcgcacaaaagcaagatcgatctcctgaccaagcagtttggcaatcagctgatccgtcgttgcggtcgtcaatttgatattaatttcggggtaagcttccttgatcttgggtaaaaaatcgggaatgacatagttggataccgatactgtactaccaagtcgaagagcatccggtgttgatcgccgttgctgaatcttctgcttgcccttctgaatcacttgcagcacttgctgcgcatatggcaggaatttccgaccttcatctgtcagcacaatttgtttgccaagccgatcaaacaacttgcagcccagctccctttccagtgactgaatgcgagctgtgaccgaaggttgggacaagaagagtacttcggcagccttattgaagcttccataatgattgatatatacaaatgcttcaatattctcgatattcatgagcgcctccgtatccacgtccgcagacgtttgatcttatattgatttatccaatacacttacttggttttatgatatcgtaatcccatccttttccagtgtcaatatcaattcatccagcgagcgatccaaacgtgtagtcacatctgccgagagtacaaattttccatcatccaatcgctcaattccctgatccacagcatacacgccacccaagatatgtcttccaccaagggctgccagaacaggcttcaatgcataatcaatggcgagcagatgagctatagagccaccgataacgagcggaagtgtcaacttgccccgcaacccttcttgcggaatcagatccaggaacagcttgagcactcccgagtacgatgccttgtataccggtgtagccacaataactgcatccgccgcttccacgacagcgagtgcatcacgaacgaatgagctgtcaaaccgggcttgcaccagatcctcagcgggcaggtccacaacatgaatgacttcaacagtgatgcctgcctccgttaatttttggctgctgtaatccgtcagacctgtcaaacgcgaacgtttggaaggtgatcctgcaataatgacaacatgtgacatgaatatctcctcctcaagcgtaaacggctgtcgccgtcctctggtggcacagctaccgtttcgcagtgaaatataaaaatggatagggtgaaacttataaattcttatattttggaatagcggtcaagccgctccttttactttggggtccagccgatcgcgaatatcgtctccaatcagattaaccgccagtacaaacaacgtgatcgccagacccgggaacgtacatatccaccaggcaaccgtcagataacctctaccttgcgagagcaatgcgccccaatccggtatttccttcaacaccccaagtcccagaaaactgagtccggaacccgtaagaattgatgtccctacaccaagcgtagccatgaccagcaagggtgacaacgaatgtggcagtacatgtttccagaaaatacgtgcattggaaccgcccagtgaacgtgtcgctgtaatgaaaggcagacctttaactgatatgacctgcccacgcatcacccgtgcgtagcccggaatggaggaaaccgcaacagctagtgcaatgttcatcagtcctggcccgagagcagctgcaacagacaatgcaaggagcacgccgggtacagccatcagaatatcgacagcccgcatcgtgatggtatcaacaattcctccggcataacctgagataataccaagagcactaccgacaataccgcccacaagaacggaagcaaaaccaatgagcagcgaatccctgcttccatgcacaactacactgaagatatccctgccaaaatagtccgtcccgaacagatgcgcagcagaaggagcctgcagaatagcatccgtcatcatctgagttggatcatagggcgcaatccagcccggtacaatcgcacatgccacggtaaacaccaccaccagcaatgctgcataaaagaataatcgggataccgcgaatgagacgcgataacgccaagggcggcgattccacagacggatacgtcctacactgcccgcccatgcttttttgtcaccaaccaaaggtttcatgctcatgagcaacaactcctccttccatactccgcgtcaggacacttctgactgttccggctgtcatcatgttcggactgcacgccgaacccggggatcaatgtacgaatacgagatgtccaccagcaaattcaagaccacatagataatggatgtaaagaaaacaaccccttgcaccactggcagatccttggccattagcgcatccgcaataattcggccgatcccctgtctggagaagacggtctccaccacaacggttcccgcaagcagatcaccgatcagcatgccgattaccgttacggcagggatcagggcattacgcagcgcatggccatacatgatggcacgctccgaaagtcctttagcccgtaatgccacgataaacggttcattgatgacttccagcatgctgttcctcaccatccgtacgataaatcctgcacccacgagccccagcgtagctgccggaagaaccagtgagctgaatccgtcggaacccatcgccgggaaccagccaagctgtaccgaaaataacaggatgagaagaatccccgtccaaaaggttggcatggagataccaaacagtccaacgagccgggcaacgaaatcaatcacgccattgcgatgaattgcagacaatacaccgagtgtaattccaatcgtgatggcaatgattgagctgagtgcggtcaaagccagtgtggctggaaaatgttccagtatttttggcagaactggatcggaattgatcattgatttaccgaaatccccacgcagcatatcaccgaaatagttcgcaaactggatgtaaaacggctgatccagtccaagctgaacccgcagattctcgatcatctccggggtagccgaggacgggtccagcatgagcagaaccggatcacccggcagaagatacatgatgcagtacaccagcaccgaagctccgaaaataaccagaagcgatgttgcgagtcgtgacagtatcgtttgaaccataccgggatatctccttcctgaatctggattggtcgttcctatagtacgtgttcaaaaagaccagttttcagtaccgagaagatggaatgaagctagaaatggagtagcggagcgtaggaaactacgtgagcaactgaaatgtttccgaaggaaacatccttcgtaagccccccgcttatttcggctgaatttcatattcgatgctgatcatgccattaggcatgactcgtaatcaaaagtggactttttgaacaacctctgttagggctgaatgcggacgtcgttaaagagtggataccccagtgaatcaaacttgatgccttcgacctttttggatgcagcgacggtatacgggaatacatagatcggcagaattaccgcttgctcaatcaggtattgctggatttgattgtagatctgaacacgtttatcaggatccgtctcgaccgctccctgctccagcaattcatcgatctttggatcagacaaaccggacaatgtcgggcgctcgccctctgcactcgtatgatagaaagcgtacaaggcattaggatcagaattgacctgactgttgccatagagatcataatcccagttctgatagatgaccgttgctacgtcttttgtaatctcgacttcaacagcaatgccaacctgtttcaactgttgctggataatggcggcaatgtcattgcgtttctcccgattgggcgaaccatcgacataacgcaggatcagtttctggccgtctttggcacgaataccgtcagcgcctttcacccagccttgttcatcgagcagttgattggctttgttgatgtccgggttaatgctaccttccagcgatgcatcataacccaggattccaggagacagtgcggaccatgcacgttcgtagttgcccagatacaatgttttgacaatcgattccacatctacagcggattgtaccgcctgccttactttcacatcatcccaaggcgctttgcgcagattgaaaaagagtgtgtatggcaacccaaccgtattggcctgcaacaattgctggttcggatcgttttttaatgcagcgatattctgcggtggaaccgtctcggcagcgagtacctgactactctgtacacttccgatacgcgtcgcttcttccggtacaatcttgaatgtgatcgtatccacatggggcgcggctttattttcaaccgtctcaggtccccagttgtaatccttgtttttggcaacgacgatatccgcattttcatcccatttcacaaaggtatacggacctgtgcccaccggatttttacctagctggtcaccatatttttgggcagctgtaggggatacgatccccagaagtgcctggctcaagttgccaagaaaggcttgtgatggtgcttccagatttaccttgatggtagattcatcaatgacttcggaggagctatacggtctaatcagggccagagaattggcagctttggtggccggatcaatcacccggtccagattgtatttcacggcttccgcattaaacggtgtaccatcatggaacttcacaccttcacgcagcttgaacgtataactcttgccgtcctcggatacgctccattccgtggcaagccacggtttgatggaaccatcaggcagctgcacaaccagattgtcgtagatcgtccggatggcacgcaccgttacggcaagcccactgcgatgagggtccagcgtatcgggtgaagttgcaagtgcaaaagtcaggttgcctccttcggcttgcccggcctgccccccgcctgatgcctgtgccgtactgttcgtgctgcctcccgccgctccgcaaccggataataccatcaccaatactgctgccaatgccatatatttcatccatgagatagacctgttcatatcgcttccccctctgtgtatacaggtgtcattaaattgatgtttataccaatactctatatatcctatgagttaagtcggttttaagatagtacgaaacgtagtgattactttaataccgtttggagaacacaacagacaaaatcaaatgctcgttcgctccctatccgttatgccaaatcagatacaacttgcttcttcgcagccgtataacggttaaccggaatctgtaccccaaggttacctcgcaatgtatcgtgttcatagtccgtacgatacagaccgcgttcttgcagaatcggaacaaccagttccacgaaatcagacaatccactcggcagttccgaagcaataatgaaaccatccgctgcttccgtctcgaaccattcctgaatcttgtcagcaacctgctccggtgtgcccaggaatttgctacgcggtgttgctgcccgcagagccacttcacgcaaggtcaatccctgctctttggcatccttcttgatcttgtcagttccactgcggaaactattgcttccaatgccattcagctccgggaacggttcatccagcggatattgggagaaatcatggtgttcgaagaaacgtcccagataatccagcgctttatcaatggtaaccagacttgcgatctcctgatatttctgttcagcttcctcttcggtctgtccaacaataggattgatgcctggcagaataacaatatcctgtgaagaacgtccataggaagccgcccgtgttttcacatccttataaaatgcctgtgcatcttcaatcgtatcgtgtccggtaaagacagcatccgcttcttgcgccgccagcgttttgccatcttccgatgaacctgcctggaaaatcaccggctgtccttgccgtgaacgggcaatattgagcggaccttgtacggagaaaaactctccttcatgattaagcgtgtgcagcttggatggatcaaagaagacaccgctctctttgtctctcacaaaggcatcatcttcccaagagtcccacaaccctttggttacctgtaaatattccgcggcaatgcgataacgttccggatgcgaagggtgactgctcttgctatagttcttcgctgtaccttccagcggagaagtcacgacgttccagcctgcacggccatcactgatctgatcgagggaaccgaactgtctggctacggtgaacggatcactataggatgtcgagagggtgcctaccagtccaatatgtgaagtaacggcagccaaagcggagaggatactgattggttcaaagcgattgaggaaatgcggaatcgatttctcggtaatatacagaccgtctgcgataaagaccagatcgaacttgccttcctccgctttcagtgcctgacgtttgtagaatccaaagttaacgctggcatccgacagaacctccgggtgtctccatgtggtgttgcttcctccaaccccatgaataatggctccaaatttcaaactgcgtttcgctgtcatatgcactccgccttccttggattagaatcttcaaaagaatgatcaagggccaactgaactgattacgtatgcgaaataacttaaaagttaactattcctatgagtttggtttgttttaattccacaaatcttatcactgccccgtaaaagggtcaacagcgtgactaatagattttttctatatgaacattgaagatgtaaataagaccatttacataccaaataagccataacttatgaacgctccagctgctgtacaattgcgatcttgcatcatgcagcagccggaacggcttgctccaaaggtatatatcaactcccgttagactgttgccgcttcgtccgctcgtgccagaagttccgccagcttctccagatcaggttctagcaaggcttcaaacttgccatcccctcccacttcaataacgggtacatgccgaatgccatattttgcttcaagcacatcacgtagcacgtcatttccctgcacttcaatgttctcaaaaggctggtttcgctctgtcaaaaatgctttcacttccccgcagaaatgacagcctgttttgctccacagcacgacttttttggttgatgatgacatcgacatacctcctgattgtttttaagatcaagatctgggcgattaactatgaacgacctagaccctcaattcccatctgttaaataagaattatggctctaaatgtactcccgtgcccttcctgcgtcaatggatctgctaatagaataaacctataaccaaatagaaagattaaattataaatttgaaagacggcttattttacaggaatgaatcgctattggcccctcctaacctggttaaaagcttgtttcgctaaatcagtgtagaactcgatctgatccggacttcgatctatagcccacctcagggtatcaaaagctttcaataacaacacatggctcgcttgattcagttcgcgctcttgttcttgtgtgcctgtcccatatccttctaaaaacgctttcatttcttccttgtcaggaccctcaccccgtagctggcattgcatgagttgaatgatatcgccatacggcacggcggtgacctccgcattcccccagtccagaagggtaatctcacacgttgaacttacgattgtattcttcaaggagagatcgccatggcataaaccaaagcggaactttggcaatttcaattgttcgaaccattgccttacaagctgtgattcctccatcgtaatgacaccaagctcaatcaatggatcttgctccgtgagactattgatattgtattgcacatatccttgccaacttccatctgatcctgcatgagggggagagtagaagcgatcctgtacagaattgtgcagatcccttccgaaacctgtaacggggatggattgcaaacgttgagtatactcaccaagtttcctccagatcatggacgggggcactgtcgtgtccaatccgttgtccccttccacaaccgtttgaatcatataggcatgttcagcgttgaccccaacggacaatgtctctggaccaggaataccggcactcgccgctttttcgatgcaccatttttctttcacaaaggtagaatatgtatctggatcgttcatgcgtacaaccactttatgacttgctgtctccaccaagcagacctgattaacaaagcctttacccacgatatgatgtgagcattttacttgttccagcaaaaactcactggcaatctgttcggcttgtctgactacagaattcttcatcccttatcctccctcaatctctatacttcaagtgatctatataagttgaattaatcatttatacgataacggagaggacagaaaaaacctgaaaaagcgtagctacaagctttctgaaagaaagctactttgaaagcatacacttcgcctaaaagctttctgaaagaaagctgcctcggaagcatacgctatccccggattttcccttgagaaaggggaatcgaaaaaatctggggataacagcgattggaaggttattctgtcatcgtagtgtcagtataaataatctttagttcaacttatatagctaccaactcatatgtaatattcggatgcggaatgaatcagagcgattacacagggtaccgctacattttccattccgcatcatgctgctgattccataaacagatcgcctgacattacagatctgggttcaagagctgaggtggggcgataatgggccagccttcttccatcgaattcagttggtccgcagacacgctgataatatgcccagaatgtacaccccaacgttctgccgcatagaccgatacaaatcgtctccgcttgtctccactgatctgatatcgaatctcgggtgcatccactgcggcaataatacttccttctgcccatccatggggagaaccatgaaccgctgtcgtatgcacctgttgtgattccctcggccatccttgcacgtcccccgctgatatcagtgcttctccggcaggaatggcgagcaggtccggtttggcaacctgaacaggagatattccacgcggtacagggatgttcaacttacgccgccgaccgccagttaaagtatagacctctcctttggcatcggacaggaacgaaccttccgggtagaagtcataactgtgtctgaactgtaatgctggatcttggctgccctgcgttgagattcgctgacgcggatccattgggtttgtgtcaccctcctcttgttgaccggatggggtaccagaggtttgttgtctagccaagcgggaggtttcggcaaccagcgcatggggatctccccacttttggctataaaactgctcgttatccttattcactacagcaaagtcttgctcacccaaggctttcatactgacacttccgaagtggtggataaaagcatccccggctaccgcaagctggtatcctgccagcttcacccgaatgatccagtcatcatcttcgaaattgcccaccgcgtacccttcgtccagataacctacccgttccagcagctcccgtgagaacagccagcagaatccgaccaggcgatcggttattcgatgtttgtctgcatccggacgattatgtgtggcggcaaaaggccacatctcttctacctcacggtacggaacctgaatctgctgatccccgccaatatagttggtcaccggacccactacaccaatcttcggatcactggcaagacaagtcatcatgttatccagccagcctggagtaacgagcgtatcgttgttcaacacgatgatatgtcgtcctctcgccatcatcagcccatgattgacacctccggcaaacccccggttcttatccagggatgccaccctcaccatgccgcctttgcggagcatggcctcggcagttccatccttggaggcattatccacaacaatgatttcgaaaggggcaggggtatgtttctcgatactggacacacattgcagcacatactcccgctgattgtacgtggggataatgatgctaactccttcaaaaacaagaccaaacgagctctgtccctggcggacaccttcgttgtatcctctggtatacccctgtttgtagagcctggcgcctttgggtgtgcgcctgcttttgcctttacgtctggatttccgtattgagcgacgacctgctgcatgcaggactgccatgtcagatcgcgagacatcgtgttgtgtggcacggcaggccgcttttttttcgctgcttatgctgccattcctgttgttttcactgcggctgttgtcactgtgagtgctgatatttggagtgatgttgtgatgactgtgaccctttcgacggacgacgtttcgagccttaaccttgttgctgcggctatgacgtttttccccgcgctgttgatcgggtgtgctcatgttgctccctccatttccacttgtccgcgaggccaacacgcacatgaccagcccccggacggtccactagagttgaagctctcctgttaccagtttgtcagccaaatgtccaaaatccagagcgaccttgccgagttcatctgcaattcgccgacacagaatgaccgccggaattcccgccgccaccaaagcgatatcaaaagcatgttctgcggtttgctgcatcaccctcggaatatccataactcccgccacagaaccaatgatacctgtgacatgaatcccccggttatgcagcagtgccgcaagctctggtgcctggctgcctatgagcagaacccgccgtccttgcagcaagggcaacaccagaccggactgatgcagactgtaattgatcgtggagctggtcaatttcagccgggaccagtcgatcccgaagtggcgcaataccgggaataacagcccctggaatgtcggtgcccgcgagatcggcacgccaacccagtcggcggcctgtatggcttccgcaagcatcgcgcggatgtcgggggttgagcagggcacccctgcatagggcagaaacggtgccagctcctgcacttcgtggcctggaagcaccgtatcggctgccagcgtgagcagttcgccatctccgaggcgaacgacagacaaggggcgctgcgcatccagcgccgccgtgatgtgtccagccatctcatgagggctggacagccgggccagactgggcgcgtattggcggaatcccgccgcgatcagatctgccgccgccacggcaggcagaatgtgatccggcgggatgtgctgcgccaccagcgcctccccgccggcgaatacgccgtcgcggtagccctcggcgtagccgccgggcacggcctccgcctgcactgcgtgctccgcgggcggaggcggcaagcccttcgcgctgcccgccttcgcgccggcagcgcttccccgccccgcgggggcgacacccttcgggtgtgtcgcctggcgcggggcggggccagcaccgctggcaggcatcgcctgtggcgtgctggcttgcggtgctggcaagggcgcacggcgcatcgccgtgcgctgcttggcgcgggcagcggcactccggccccgcgcggatgccggcctgcgccaagcagtggcctggcgcaggccggctttgcctttgccggtgcggctggctcttgccgctctgctcgcgcccgcagagccagctttgcctgctctgccaacaacactgcctgtgctgctggctttccttgcagcagccttatgcgatgcgccggcagatgtacccgctttggtcggggtactccgtttccctgacttcacacctttgactccagcagaccctgtacctgctgctgccggagtgccactgcccataaatacggccgggtggatgccccggggcttacccgacacggaggccctagcggccccggtgcgtatcactactctcacgccattccctcctttggcatgcacgaggattgtcgctgcgcaaagcgccggagcatccttccggctccggcgcagagtgttctgctcccatggggcaccgcacagcggcagcatcagtcgcatatattttagggcaattgtcctttcatacggacagctgcttcctggagcgattcaaatgtacctgcatcactccagtatttctgcaaaatgtcgtattccagtccgccagcagacgcgtagtgattattcacatccgtaatttcaagttctccgcgcgcagacggcgcaatattgcgaatcaggttaaatacatgatcgtcatacatgtatatgcccgtcacacaataagaggttttcggctggcttggcttctcctcaatgtacgagattcgctcaggatgctttggatcaaaaacaggcaccccgtaacgtcgtgcatcatccacctctttgagtagaactcgcgctgtaccagcaggttgctgcatgtaacggtccacataaggcttcagatcatcgctgaagagattatcaccgagaagcacaacgaatttttcgccaggaagaataaaagaagttgccagatccaatgcttccgcaatcccgcctgccttttcctgaatgcgataagtcaacttgaccccatgatctgctccgccaccaagatactctgtatataacccggcggaatgtttgttgatcacaatcaatagttcatcaatgcctgcctggcggagcctgtcgatgccatacataatcatcggatgtttaccgactggaagcagatgtttgttaatgagccgggtcagcggatacagtctagttcctgttccgccggcaagaattacacctttcattccacgttccctccttcatcggatatgtccatatattcaagcggatcgacatgccatttgttcataaaaatcgaacgattacgctcaagcagctgtttccacgctaccggatctgtcttctggaagctggcacttccctgatggtgcacgagaacatctccgcataccagcaggcgatatccctgcaatcttgctctataacaataatcgtcatcctcatagtgtcccggagaatatgcctcgtcaagcagtccaactgattccacgacatctcgtttcatcagcatgcacagaccgacgatccggcgtacttccctccaccttgaagaatccgcaacattattggaattggccaactcctgaaaatgttccatatcccgaaactgtagtttaatctgctggatgccgcttgcataattcgtaacaggccccgtgatcccaatactttgatcactgtacagagccgttcgcagattctccagccaacggggcgtgaccgtaacatcattgttcagcagcaataactcatccccgcaggctgcacgaagtccagcgttacacgctgccggaaatccccgattgtccgggaaccttacaaatcgaattcgctccagcgcacaatattcagccgttccatccgtcgaaccgttatctaccacgataatttcatatgacgcaggatcgcccgagtattgacgtatggcatcgatgcagggcctgatcagatccagcccattgtaagttgggataatcatactcgtcagtgtcattaggcgttcctcctgtaagcgacttctacacgggagagtgtatgtgcctgggctggattccaacctgtacccagcaatgtagccagtgcctccagatgatctccgatgatcaatttggcgacatcattcccacttcccgtgttaccaggacgcaaccgattggaacgaataacatccacctgacttggtgccgagacgttcattccatgctgaatagctagactttgtgccttaggtggaacggccagtgatgctggcttcacggtctgaatcatacgacgagataatgcatgaggcacggctgtcatggaattggaaccaagatctgccctgcctaatgttcggttcagatatgctttgatccggcttacctcatcctggcctgcaaacgcaggcagcaaagacgtcagattattcaacgccacatcctgtccccgatcaaccgtgaacagaaagggtgcaagctgttcagccgagacgaccatatctccatccacaaaaattaccgtctccgcgtccgtcatcttggctccaagtgcccggcccacatcatgtcctgcccgatccggttcatagattactgtaagtcccgcctgccttagtacctgcttcaaactgtcatctgtcgttccattcagtaccacaataatatccgtcagaggcaaccgctttagttgcaataacacctgccccagtgtgtgttcttcattacaggcacagacaatggcagcagccgaatgacgaagaggtagtggcacgatctggaatgaatgtcccgaggcctgagcataaccttgcataaatgccttacctgccttcagagctagctcgaaattgcttagctccgcaacgttcaccgcgtgtgcattccatacgagacgtgcatgttcttctgatactgtgttgtttgcctttgcctcgcttcctgcaacttgccccgctttccacatcaagtgcagatttactgggccagactttgctcggcttcttctttttttttgaatatctacatgtttcttgttcctatgacgcttgttcattactgttcttcctgctgtcgttggtctacttgttgtccgcctgcggcggacaacccctgaacgtcccttcatttcctcacctccagcatgctgcatcatccgatgcgacatgcttacctcgccaggttgcgaacacgttgcagatcggtataacctccgcggggaccgagcgtatccgtaatccacttaatcgctgccatatgatcattcagtaccacttgacttagcagatcaggtccgcttcgcttcttgattcgtactgcattcattctacccacaggtacgtgatgaacagcgcgtacccgaagtcctccgatcactgccttcgcttgtgcgagtggcggaacttccagtgaggatatccccatgacctcaagcccttttcggcttattgcatgtggaattgctgtcatggatgccccccggagatcggatcttgcgagtatgctgttcaacatgtgtttggcctccactaccggatgaacgggatgatgagtgaccggcccatggtagtcgttaagcgccacatccgttcccttcagcacagccttcacgtaaggtgcaaggtgctctgcgggaattgcgatatctgcatcagtaaataacaatacctgaccgcgcgcctccgctgcgcctacttttcgtcctccatcatgccccagtgcttcggcatacgtgagcactcgtgctccagcccgtttggctgcgtttgccgtaccgtctgttgaaccattcacaacgacaagcacttcagcatcacggcatatccgcagcgcttcacggacaactgcaccaatccttttctcctcattcatagcagggataatgaccgagagcatcggtccctgagaaacatctctgtgtgaaggagcatcactcatgccattttccgctccattctctcctccatccttagcctgtaacatcagctgtttggatggaataacgaacgtataggcctttgtaccctttttgtgtccagacttccatcttcgtttcttcagcactgtttttcttcgtgtcacattggatcgggttgcataacgtgctgtggtacgggttttgcgcaacagtttcacctcccgcattcgatcatcggcatgccaagggagtacacgttattctatgtattcgtggagcagtggaaacggcgtttgtccttgcactaagcaggttctccctgtgaacacgagggtacaggccttgctttcagacaaaatacgtcaaaatatgtgaaaaacgctacctctcccctacttcagacacaaatttaacaaaaatctaaaattgtatcttttccaaagttttacattgtgataatatacgttccaagcggttttatttacaaaaataaccttgcggtgaacatgagttcccctatattttttaaatcaatttattgaccttaggttgattagattatgacctcattcacagaacttgttaagcagatacattctactcttgagaggagtgatgccgttcagaacacactgcctttgtcatttacgcaaacccggattgaacaccccagttttccgtgaacgtatcttctacctgcgcaattggacaacccccggctttctgaaagaggaacacaatagacgattaaaccttcgggttgaactgaataaacggttatcctttttgtttggtgtcgtgcttaacacttcccgagctaaggccaagccgattttgttccaatcgtttcttgtctcattccacgcttcaggtctagccccacgctccgcgctgcccaagttgcagacggaattccaaccgagactggcatgaacattttccaaccaaaaataagtttaagaatgggagagtttactatgaaatttgccaaagttatgccaacaattcttggaggagctcttttgctcgcttccgtgtcctctgctactgcagctccagtgtctgatcaatccattccacttcaggccccttatgcctctgaggagggtattccattgaacagtggaacagatgacactatctttaattatcttggacagcaggaacaatttctgaattccgatgtgaaatcccagctcaaaattgttaaaagaaacacagatacatctggcgtaagacacttccgcctgaaacagtatattaaaggtatcccggtttatggtgcagaacagacggttcacctggacaaaaccggagccgtgagctccgcacttggcgatcttccaccgattgaagagcaggccattccaaatgatggtgtagccgagatcagcggagaagacgcgatccgtattgcaaccgaagaagcaacctcccggattggagagcttggtgccgcggaaatcacacctcaagctgaattgaacatctatcatcatgaagaagatggtcagacatatctggtttacattacggaagtaaacgtactggaacctgcccctctacggaccaaatatttcattaacgcagtggatggcagtatcgtatcccagtttgacctcattaacttcgctactggaacaggtacaggtgtactcggtgataccaaaaccctgacaaccacccaatccggcagcaccttccaactgaaagacaccactcgcggcaatggcatccaaacgtacacggcgaacaatggctcctcactgcctggtagcttgctcacggattcggataatgtatggactgatcgtgcaggtgtagatgctcacgctcatgcggctgctacgtatgatttctacaaaaacaaattcaaccgtaacggtattaatggtaacggattgttgatcagatcaaccgtgcactacggctccaattacaataatgccttctggaacggggcacagatagtctttggtgacggcgatggaacgatgttccgatccctgtctggtgatctggatgttgtgggccatgaattgacgcatggtgttattgaatatacagccaatttggaatatcgcaatgaaccaggcgcactcaatgaagcctttgccgatattttcggtaatacgatccaaagcaaaaactggctgctcggtgatgatatctacacacctaacactccaggagatgcgctgcgctccctctccaaccctacattgtatggtcaacctgacaaatacagcgatcgctacacaggctcacaggacaacggcggtgtccatatcaacagtggtatcatcaataaagcctatttccttgctgctcaaggcgggacacataatggtgtgactgttaccggaatcggccgggataaagcgatccagattttctacagcacactggtgaactacctgacaccaacgtccaaatttgccgctgccaaaacagctaccattcaagcagccaaagatctgtacggagcaacttccgctgaagctactgctattaccaaagcgtatcaagctgtaggcctgtaaaatcttattttattgtagttgaacttataatgtactcatcctaatggtaacaaaacgttcagacacccctcaccgtccgaacggattaagctgatatcaatcaaaagcggtgtcccggacaactctggacaccgcttttgtcatttgtttattacggatacaatcctgcactatccttgcgaaggtcccgcagcaatccatgacaacaatccgtacgtatgcttgcaatctgctgtacgtgacacttcaagtaccgcttcatcctcactctgcgagagcagggaaatctggaatccccgatcattactcatgcccacaatcacataatgttctgaagcaaatgattcttcaaaaacaacagttacctctgtgcatacttcactctctggcagtacaaaagcttccatcccgaattgttgtacaactggttgtttgcttacgctgcgaacgggttggaatgccagatgtttggcctggactgcccccgattgcaactggctgctgcccacggcatcatcacacagatgctcctgtgtaatcgattgttcacttaacataaactccgtagttccaacgatctcctgtgaccgttcaagctgtggttgctgagcctgaactccctgatcttcctgatctgcctgctcagttgtgaacaaagctgccggtagttcgccaagctgatctgtttgggatatcagctcttgttgttgctccagaccagcactcggtaatgcctcgacgattacctgctgtgattgctgtacaacctcattttctggttgaagcaatccctcttgtcttttgatagctgccagctgctccagcgtttctccactgaactgacggatcgcattccatatctcttcgctcagatgcgctggacctacaatccccgcattcaaatgattagaggtaatactctgctcactcagtttgctgccgttcacgctgccatcggccaatttggcacttgtgacggacccattttgcagatgaatcccgcttactgcttcctcttccagatgagttgtgcgaatactgcgttcctgaatatgatcagcaagaatggttccatcctggatatgacgtgtttgcacacttttgtctgctatgtggatagccgataccgcaccttcaagcaatttattaccgttcacactgccgtcagccattttggcacttgttatggaaccattgtgcagatgaatcgaacttaccgattcggctttgaggtgggagattccaatgcttcgctcttgaatatggtcagcatgtatggctttctcttggatatgacgcgattgcacacttccattggcaatatggacatccgacaccgcatcttcaagcagtttgttgctgctcacactgccatccgccagtttggcactcgttacagattcattttgcagatgaaccgcacttattgcttcctcttccagatggaacgtaccaatgctgtgctcctgaatatgatcagcaaggatcgctcctgcctggatatggcgagtttgcacactttccgacgcgatatggctccccaatacagtatcttcgagcaatttgctgccactaatgctactgtcagccaatttggcacttgttacggacccattttgcagatgaaccgcacttacggcttcctcttccagatgggctgtgcctatgcttcgctcctgaatatgaccagcatgaatagctcctgcctgaatatgcccggattgcacactttccgatgcgatatgaaccccggataccgtaccttcgagtaacttgctgccagttatactgccatccgccagtttggcactcgttacagatccattttgcaaatgaatggcacttacagactcctcttccaaatgtgctgtgccgatgctccgctcttgaatatgatcagcatgaatggctcctgcctgaatcttactggattgcacactatcgtctgcaatgtggatatctgatactgcaccttcaagcaacttgctgccggttacactgccgtcggccaacttggtacttgttacagatccattttgcagatgaatggcacttactgcttcctgttccaagtgaagcatgccaatgctgtgctcctgaatatggtcagcaaagattgctccttcctgaatatggcgggattgcacactttccgatgcgatatggattcccgacaccgcatcttcaatcaacttgctgcccgttacactgccgtcggccagtttggtactgatgacagacccattttgcaggtgaatcgcacttactgcttcctcctccagatgggttgtgccgatgctccgctcctgaatatggtcagcatgaatggcccctgcctgaatatgcccggtttgcacactttcggacgcaatatgaacccccgatacggttccttcaagcaatttgctgccgttgatactgccatccgccagtttggcacttgttacagatccattttgcaaatgaactgcacttacagactgctcatccagatgaactgagccaatactgcactcttgaatatgatcagcaatgattgcgccttcttggatatgacgggtttgcacactttcattggcaaggtgagtagccgatacgctttctgcggctaatttgctgccatccacactacccgttgctagtttggagcgtgttacagattcatcctgcaaaataatcgtacttaccgcttcttcttccagatgagatgttccgatgctgcgttcatggatatgatgaggaagaatttcaccatcttgaatatgacgggaatgcacagctccttgctgtaggtgaacagcacttgtcgactctgcctgaagatgcaaaccactgatcaaacctggctgaaggtgggccgctgtaatggataaaggtgccagatggtctgtttcgacagatccgggtgccaagtgatgcgatgttaccacctgttcagcaatatgctcctcatgaatgatgtctggcttcagatgctgtgagctcactacttgagtccccaaatggtcagatttcacgctgccttcagccagatggacggattgtacaacggatggctgcaagtgctcgctacctacagcagactgttgcagttctgttccggataccgagtctgctgtcaaatggtccgcacttatggagccatgccgaagtttgttgccggtaatactgccatcagcgaataactcgggcgagcgtatttcttccgacaaatgttccagggaaacggcatgctgcttcaggtgatatccgcgaatggttcctgctggaatatgtttggcgttaatactctctgccataatcttggaagaagtcacgctgccgtctgccagtttagctgatgtgacagcaaaatccgccagtttatctgttgcaacactctctggtgaaagcttgggggaggtaaccgcatgatctgttagatgaggcggaaaaatggacccgccagccagctgggctgaagttacactatcaatagccaatttgtctgtggtgaccgcggcccgtgcaatcgcatccgtttcaacactacccggctgaagatgaggtacacctacggcatgttctgtcaaatgttccgatttcactgcataaggtctcagggcctcggaacccacgctgcctggagccagatgtgtccctgtgactccaccactcgcaagatgcgaggatataacacttcccggggcaagcgctctgctactcaccgatgccgttccaagcttttctgttgtcacacttccatccgcgagtttaacgtctgtaacggcagcatcctgcaattcatacgtacccacggccgactctgcaagatgccgctcacacaccacgtcgtctgcaagagcgtctccggacacacttccggcagatagatgagctgcctcgatgcttccacttgcaatgtgaatagagtgaattgcggaattgtccacatgtaccggcgtaattccccgatttgcaatgtgttcagcacgaatggaccctttggcaagatgtttaccctgtacggcttcatccgcaattttggaagaaatgacgctctgatcagagatcttggatgccgtaatggactgttccagcaattttgctgttccaacagactggtctgccagtttgctactggttactgcaccttctgtcaaatgctcactgcccacttctccattaccaatctgctccttgccaacggaatgagctcgaatctgacttgatccgattgaaccgtccagcagatgtcttccagttagtgaaccctcagctaaatgtcttgtttgtatggatccatcctctatctggtcacttccaataatgccatttaatagttgtgaacgaccgacagacccttctgccagatgtgtctgtttaacagcacctgcctgaatatggtgagactcgatggagtgttcttcgattttgctgcctgtgacagcagcttcacgaattttggttgtagtcactgcatcgtcagccagtttggaggtattcacagctcctcccgtgagatgccttgtatccaccccgctaatcgcgatcttgtctccagttacggcatgattcttgattaattcttccgttaccagcatgcggctgagatgtcttgtgctgatggaaccgtcggcaattttggccgaatcgatggcctggttgccaagcttctgagaagtaatactgccatctctgattttctcgcctgcaatagaagcatttcgtattttgtgaccagacacagaaccgtcaatcaggtgctcctcagatacagaggcttctgcaagtttcgctgaaacaatggccccgtctgcaatgtgaatgctggtcaccgcataatcctgcaatgcttcactgccgaccgcatccggtttcagcttggaggcatctacagagaaaggagccaatttgctctccgtaacagcaaattcactcaagtcgtccgtgtagatgtaatgtccggtatgacccggcatctggttctggttcaggatctgcagccggtccttgtttgttgtttcttgcttgatgatacccacctcttcttccagaacaagcggagccacactgctaacctgaatctgcttatccgagctatcttctgtctcgatttccttgctatcagactctgcgggttccggcttgatttcggcttcgatctccaactcttccagctcatttgttgaagaaggtagctccattgagtcgaataggaattcttccgactcctgaacagctctcgaatcccttttattcgtattcaagcgttcttccctattcacagtgaaacctgagttcatcttgtctgcccggcgatcagtcagttccaattccttgtatttcgggctcacatgccgcagtttcggcgtcggaaccttctttttgccatttttactcatgcagcttgctccttcctctaacgttcgtctccggcatcatatgcttccatatgggcatctgccacttcatttatgacttttgcggattccagagcacgaatgtacaggcgtcaagacaggaaggttcgatgatcttcgtggaaataggcgtgtcagggcagcagaggaaaggcggctgtccacgcccccgtcccagtcatgtcataggatattatatctaggtcgtgtctgaaaactcgctgaaatgcatctttcaccgtcttttcgccccctgctgtgtcactttcccttgacgtgccccggcacgcctgcggaaaacttccttgcttggaacgaagattcggcaaaacctgcttccttcagagttttagacacgccctgagcaagcactagtgcttggcgatgcatcttacacaccggtctgcgttatcgcgatgtctgagccatgcggtgacaggccggcattccatgaatggacgatccatggtcgcgataacatcgaaggaggaacggtcatgctccaagaaacgatcggcattatgttcgattcacgcatgtaccgggggataccggccggaaggaccggtcaggaatcactcgcgaattatgaacaggcagcggccagttatggattaactccctgctttttgaggctggaagatatcgattcggatcaaaaaacatgtcttgcctatgtaaaaaaagaaggcagatatgttcgcgagcgcatgccactgccctccgtcattcataaccgctcactccagcttcgccggacggaacagcatcagattaccaagctgatgttgcagggtatccaggtattcaacgttcgcaaccggtaccgtaaagatcacattcatgacatgcttcagcaggaccccgccttgagagaacacctgccccatgcagttaaagctacgccggaatctctggcctatatgatggaacaacatgatgacctcgtcatcaaaccatgcagcggtagcatcggtcatgggattatgcgagtcttcgagcgagatgggcagtggaaactaacctgtgagacgaaggcggcacgcaaagggtgggctaccttccgattgagcaaaggacagcttccttccgccaccctaaggcggatctttcgccatgcctacctcattgaagagcgtatcccactggtacgttatgagggcaggccggtagatttgcgggtatctgtacaacgtggtggcgatggtctttggggaataacaggcatgtttgccaaagcggctcctgcccatacgtttgtcagcaacatcgcccagggcggtaaagtcatgaagcttgcagaggcccttggattaggagaatctggcttcgaactggctcgactggaatacagaatcggactcgttgcacttcgaattgcccagaacctggcggccagtcttccacatctggctgatctgggtcttgatctcgggataacgcgcagcggccagatctattttattgaatgcaatggacgggatcagcgttacggttttcgcaaggcgggaatgtcggaacactggaaggcaacgtacagcaaaccgatggcttatgggcgtctgctgctggaacagaattcaagaattccgagacaaccgcagacatacgataggagactatattgatttcgtgtgcattctgtgtcaatattatgcagaacggccggtcttgccggccttgaagttcgcattaaccctaagggggatattcatggcaaaaacgctgttgcgattaatgaccgagctttcttcgcgcaaatggatctcccggaccgtgggagccttctccaaaagccggggaagtaaggcatttatcccttattttgtccggacctacgacatccctgttcaggaggccgagaaagactggaaggaataccgttcactgaacgatttctttacccgcaaattaaagccgggcatgcgcccgttggaactttcagagcatgcactgatcagcccggtagatgccaagattacggcagccggtccaatatctgcagggacactcctgaatgttaagggacaaaattatacacttgctgaattattaaaccattctccccatctggagaagtacaagcacgggtacgggttcgtcctctatctcagccctcgcgactatcaccgcattcatgcacctgtcagcggccgcaagatagagagcgaacacatcaaaggcaaagtttatcccgtgaatgactttggcctgacccatatgagatccgtgcttagtcgaaacgaacgactcattacgtatatcgcacatgattacggtgaagtggcggttgtcaaagtaggtgcgatgaacgtgagtagcatacaatatgctgatacggacacaagtacctgggcacaaggcgatgatctggcctattttgaattcggttccaccgttgttctgctgacgcagagtggcacattcgaaccaaaccctggcttacagccaggcgattcggtcaaaatgggagcattgcttggtcgtttgaaaccaaagaactaatgagtccatacgcaaataaagaggatggcgcagcacctgtaaccaggtattgcgccatcctctttatgaattcatattcatccatatatacatgcaatacgaagcttcgctccgtcgttattggtctgctgagttctcctcaaaaccacacatcttgcaagtcctctgccggtttgaagcgacgcagacggttccggaaaatattgcatcccttcgtagagcatccccggttgcggacccgacgttttccgttcatcacaagttcccccttttggtcatctggaatgctagataattacccttgcattccagacttgaaacggtttcctgtttttctcatcagaattttaacgaatctcggacgggcttttgccggtatactgcttgaactgacgactgaagaagaaaatatcccggtagcccagagcatccgccacttcggtcacattcatgccggtatgcaccagcagatgttccgcccgttcaatacgcatgcggataatataagattgcaccgatgatcccaccagttccttgaacttgatcgagaagtatcggggcgataagccagcccgcgcagccagatcttccacccgatgcgtaattcccggatgctgacgcacataattggcgacctcctggatgacatcggacaattggttgcttacctttttctccacaggttcttccgtatcggcgcgcagcaaatgaatcatcaattgtttcagaatcaatcggctctcttcatcacgtccgtacacatctgataagaacagtcttacataacgtgccagcaagtgctcaaactccaccgtttcctgtacctcgcgataagactggggaacgtcagcaacaggcacgtccacatcaaagtgaatatacgtaagtaccaacggtttttgcttattatgtgttgcagtaggatgatctcctggcctgaacaaaaaacaactacccttgccaacttcatacgactggtcattcagtacaagcgttccttcaccactccatacataaaataaatcatagttttgcatcggtttttcccgtttctgccacttccagcccggttcacagacaattttggcgacagcgggcaaaataacaaatgatgacggcgatgcctgcagcatgtcgccactcccccttgatagttaatctctctgcatatggcatcattctgatctgaatctcacttcttcaatccaggccatatgtatttcagtatcttgcatgattaaatacaacttgctcatatataatctctgctcctataggagcgaaatgtcttatcccattatacagcggaattcaccgaaacgaaaatgtgcacttctcccaggctagccgcattcgccggattccctctgtcatctcttctttctccagatgtgcaaaagcaaaacaggccgccggatgacctgaagtcaaccgatatcgctctgcatcacggaacaatatgccatcctcctgagcaagctttttaaatcgctgataactgtccacatcgccattccaggtagcgtagatatgcagtcctgcatcaccaagctgcatcgtgaatgcctccggcaactgtagttccatctctcggacaaaaaaatcatgccgttccccatataaccgggttaaccgtcgtaagtgcctcaggtaacctcctctggtcataaattttgccagtgcgcgctgctccagcagtgccggaggtaccggttcatacaacgccttggcggcaagcagaggttctaccagaccaggtggcaggacggcgtagccaagtcgaaacgaagcaaccatcgtttgtgagaatgaaccaacgtagatgacgcgctgttcacgatcaagcactttgaggggttcaattggtcttccaccccatcggaattcactgtcgtaatcatcttcaatgatgaccgcattccgctttgaggcccacgcaagcaaggcacgtcttctgtccaatcccagcacggcccctgttggaaactgccgggtaggggtgacaaataacgtctgtgcctcccaaggctgaggaataatgcctgcggcatccacctctgccgggatgatatgcccaccacaggacttgacggcatgggcgatgcctggataacccggattctccaatacaactgctgtattctccgtaatcagcagttgagatagcagggtgatgccttgcattgaaccactgaacaatacaatctgagagggttcagcctggataccacgtgtccatctgagatgggaggcgatggcctcacgcagctccgggtcaccggctacaccgctcgattctcgccaaccactgcgatgaaccgcagcgagtgcactcttccactcccctaacgggaaatgttcggcaggcatgcgctgcatttgaaaattaatgacggacggcttcggtgaagacatctgagtccgcaggacttcatgttgtgtattcaacctctgtactcgttcgccccagggagacagcttgagaacggcttcctttttttcattttcctgagtggataatgtttcggtgacaaatgtacctcttccccgatgtgcatggacataaccatccgcaagcagcatgtcgtatacctgagctaccgaaccacgtgacatctcatattgctttgccaactcacgggtggaaggaagccgcgtgcctcccaccaatgtgcctgcatgaatggcatcacgtaacgcatggtacaatgcctcatacttgtatcgatgctgaagttcataggtatccatcggcagccacaattccatcatgcacctctcttcatttgtcttcatctgtgatccctgactaattggcctactaaagtgaatgtaaattggatctatttcattgtcaatgtatgaactatggttatccataagatatggcgttttattatacatttcaatgatgggggattacacatgagacggaaagaattcacagtagatgaagaacaggaaattaccgcatttctggatcagtgctccttcgggtttctgggaacggtcagcccggacggacaaccacgggttacaccgctgaattttgtatatatggacggttgcttttattttcacggcagtctggctggtgagaagatgaaacagatcaaacaggattcgtcggtcagtttcacagtagctgaagagttctccctgattccatcctatttcagtgatcctgagcttgcttgtccagcgacttctttcttcaaaagtgtcatggccttcggtcaggcagaaccggttaaagatctggacatcaaaggtaaggtactacaacgattcatggagaaactccaaccgcaaggcggatatgtacccattgacgctactgactcgcgttacacaggaaacctcaaagctgtagccgtagttcgaattattcctgaacggatcagcgccaagtttaaatttggacaaaacctctccagtgaacgattcgatcatatcagtggtcagttggaacagcgtaatgaaggaagagatactgaaactgctgaaatgatgcggaaatactgtccatttcatcagcaataagtttcatttcttgaggattactccaaggttgaattcaacgataacccacccgaaaaccctctgcaacaacgcggtaaagcgatataactgtcatattgcgtaatttccgtgacgggggcatgtcaaggtgatataatgttaggcagttgaatcacaaagacttggaaggatgaaaagaatgaatccactggctgaacagttgaacgaaagtattcagacaggcagcagtcacgtctactccatgctgtcacagcttggcaaagaaatttattttcctaaagaagggatcttgagtcaatctgctgaagcagcaagcttggccaagacccataatgccacgattggtatcgccctggagggtggtgtgccgatgcatcttcaggttattcaggagaagctgtctgcattccagccaaaggacctgtatccttacgctccacctgcaggcaaacctgaattgcggaccgtctggagagacaagatgctgaaggaaacgccttccctggaaggcaaaacgtttggcaatccgattgtaaccaatgctttaacccatggactaagtatcgtagccgacctgttcgccgatgaaggggacgctgtcatatatccggataaaaactgggaaaattacgagctgaccttcggaattcgtcgtcatggccagttggttcattatcccctgttcgatgatcagttgaacttcaacagtgagggtctgcttcaggctttgcttgatcagaaggacaaaggtaaagccatcgtgctgctcaacttcccgaataaccctacaggttatacgcctggagccgaagaagcagatgccattgtgaacacgattcttcaggcagctgaagccggcgttaacgtggttgctgtaacagatgatgcctactttggactgttcttcgaagattccattcatgaatccctgtttggcaaacttgccaacattcatccacgtgtgttgaccgtaaaagtggatggtgcaaccaaggaagaattcgtatggggcttccgcgttggattcattacgtatgcccatgaagatgcagccgttctgcatgcattggaacaaaaaacactcggtattatccgggcaacgatctccagtggcccgcatccttcccagacttttgtactggatgcgctcaaagcaccggaatttgaagcacagaaacaggagaagttcgagattatgaaaggccgcgccaataaggtaaaagccattctcgatagcggcaagtatggagatgcatgggactattatccgttcaactccggttacttcatgtgcctgaagctaaaagaagttggcgctgaagaacttcgaagccatttgctgcacaaatatggtgtgggtacaatcgcgctgggtgaatcggatcttcgaatcgccttctcctgtattgaagaatccgggttggaagatctgtatgaaaccatctatcgtggagttcaggatctgcggacgacttagttaacacagacctgtaccctgaatgttataagaaccctttgtataacggcgacgcttcatgtcactgaatatacgaagggttcttttgtgttttatcagcccaaaagctttaatttctggctttaccgggcatcggcccaatcagcctacccccatggcacataatatatgatgtacgcaagggcgtgccaaacaaccacttgaaaggggaatgaccatgtctggagttgaagatacaagaggcggttatggatgcggcggttacggcggaggatttacaaacacaggtgctattctcgttctgttcatcttgctcgtaatcatcactaaatcgttcctctgttagtaccaatacacacttgcgcgagaaccaagtgatctgattgcatgattccattacagcacaaagaagggtataccgggatacagcccggcatacccttcttttgttatcttttgtacctctcactgatgaacccaatgtaataatccgagttggtccggtgtccgatcgtttactcgtcctcttcttccttcaaccacttgttaccttgcgaacgccgcatgatcacaatcaccagtatacccaaaataagtgctactccggtgacagtcagtccgcttgctccggcagccagcataggcaaccacatgagcaacgcagccagtgcatgtagatggaatatgaatcccaacacctgagaacgacgactctcacccgagattggatagatcataatccagaacgattcactatgactgcgacgcagtgcacctaactgaacacctgcaagcaacaggaagaacagatacacacctacaccaaagtagctgcctgctgtccaccaggatagtaacatgcccagtacaattaaacgtaacacgattgagaacacttcggttcgaataaacgttttggtaatcagatatcggtaagctttccctgcattccagggaagaccactccccaatttgctaagccagcgacgcgaacttactttctgtccggatgaaggtacatccacaaaccagccaagcgtacgcataaccctgccagcctgaccctgctctacctggatcagtcgttcccacgctacccgatgtttcaccggtatacgcaaggcgacgatgtagacaacagccagcaacagcaggaaccagacgctgcgctgcggtggctgccacagccatgcgccaaccgccagcactgccagagcccatcgcaagagacgatatcctcttgccgcaccgacctgaaccattcttagctcttgccacgctccataactggacaaccctttccacagcaacaggaatacgatgaaccagccaaatggccgtgcatccagatctgctctgacatagagcggccacagtgtaacaaatacaagcagcaagcccagagttttatagatgatgccccgggcaaagctgttcttcaaatactcctgcatccggtattcctgtggtcgcaggaacacaatatctgccggaagcagatacgtacgataactgctaaacagcactagtggtgccagcagcagcaatgcaacccagcgaatcggaaattccgccggaatgttctggacaaacgatgtataccaggcggagaacgcaatgacgagaaataaaaagaccatagctacaccgctctggatcacataacccagataaggaagaattccgttccagaatcctgtgcgtctttgcttccatagcagcttgagatccatgctcaatccctgccttgtacgagggaatagaacatgtgctccagcgtggcatccgattccccgaattgggagcgcagttcattcagcgtaccttgagcaataacctgcccacggtgcagaacgataaaacggtcacagtaattttcaatcgtggacagaatgtgtgaactgagcaggatggatgatcccgaagctttcatctccagcataaaatcaagcaaagagcgaatacccagcgggtccagtcccaggaaaggctcatcaatgatgtacagtggtggtccggccacaaaagcacacatgatcatgaccttttgtctcatccccttggacaggtgagtcgacagacttgtacttttctcattcatacggaacagttccaacagtttctccgtacgttgtttgaaatcagcctccgacacattgtacgctcttgccgtaaactccaggtgctccatcaccgtcatctcatcatacagttcaggtgattccggtacaaatgccatagccgattggtagatctgcgcatcctcgtcccgcttcttgcccatcactcgcacttcgccctgttgaggggtcatcaagccgaggatatgtttcatggttgtacttttgccagcaccgtttaagccgattagtccgaccatctctccacgtccaacttccagatcgatgccgtgaaggacgggccgtttggcactataacctccgcttaacccgctgatttgcagaacaggcgattgaacgttttccatctatccctgcacccctttcgtcagattctattcttcggagcgtggcgttttatctttactccacttgggtgctcctttgtttttacgatcctggtcgcgctccgtgcggcctgtattacccgttggtttgctacctgccggacgcgaattggagattgtagctttggttcccccattacgattgccctgacctggtttgcgatctctggattgtcctggttttctggagaaggaatgtccctcaggccgcgtgtccggacgcgggtcagcctccagtactttaccgccaaagagtacacgttctgacagttcgattccgagttcgcgtgcgaatttacgcataataaagatctgtgtttcatccacaatggacaaaacgatacccgagcgtcccatccggcctgtacgacctgcacggtgaacatagtgctccgagtcaaaggcagggtcatagttaatgaccattggcaaaccttcgatatccagtcctctggcagccacttcgctggcaatcagcaactgaagtttgccattacggaaggcagacaatacgttactgcgggtcactttgtcagcatctccatacagcgcagcagcggacaagcccagatgattcatttttgcttcaacttcaccaatatcttcggttgcattcacaaatacgattgcccgatccggattgtactgtctaaccagacgacgcagcatgtcaattttgttacggttttcttctacaaaataataatgctcaaggcccgcagccgtagctcgatccggctcaattccgatctgaacaggctctttcatctcacgctttgcaagtccagctgtatgctcatcaatggttgctgacaggaagatcagctgacggtcccgcaatgcactcttgagtacaaagttcacgtcacttacgccgccaagttggaacacttggtccgcttcatcgataacaatcgtagagacgttgtgcattttcagttttttgagtgtaatcaattccttcagtcgtcccggtgtacccacaaccaattgtggatgctcacgcagcttctcgatctgacgtttagccgctgcgcctccaattagacccaatacgccaatcttacgttcttccgcataacgctgcgcttcacgtacaatttgcatcgccagctcttgcgtaggtgcaataatgagtttctgcgtacctttgatatccattttgatggattgtaacagtggcagcagatatgccagcgtttttcctgttcccgtctgggatttggatacgacatctcggccttccaaaataaccgggatcgtctgagcctgtacaggtgaaggttcgttaatgccatgtttcgccaaaacggcctccagatcctgttccacgccaattgaagcaaatgtttgattcgtcatgtatgtccatccttttaatttattcattttgatgttatataagttcaactaatgaatatttacactgacactacgaggacagaacaaccttccgatcactgttatccccagatttctttgattccttttttccaaaaggaaaaatccggggataaaggtgcacgcttcgcttcttcaggttatttctgtcctctccgttattgtgtaaaaagtttagttgaacatataagttgcttgtataaaaccgaagcctgtcatcacattacctttcattatatgcgaaaaaagcctgtgtaccaaatcttattccagaattgtatgtatacacgccaaaaaaaagaaaagcccctcggcggagcctttctttcattccgtatatgatgcctcgtatcacatttacttctgattcattacaccgtgcgacaatcgatctgcaagacgaggaaatagctggtacagccatatgccagcagaagcaagtcttggcagattcacttcttccttgcgctttttcatcgcccgaatcatgtgacccgcaacgtcttccggtttcaacatcatccagcgtacattattcacataattgccagaagggtcagcccgatggaaaaatggtgtatcaatcggacccggattaatcgttgtcaccatgacgccagtcttgcgaagctcttgacgcagcgcattactaaatccaagtacagcatgtttcgtagctgtataggaagcggatttggctgtacctattttgccagccatggaggccacgttcacaatctgacctttgccacgttccagcatttgtggaagcactgctttggtgcagcggacaatccccatgtaattaacgtccatcatctcatcgaattcctgtacagacatctctgtcatcgctgcgaatttcccgtaacctgcattgttcagcaaaatgtcgattcgtccgtatttatgcaatatcgcatccacagctgcctgaacctgctcactatccgtaacatcaagtgtgagtaattcatgcggccctttcagcgaggcaccaatctcttccagcttgtcccgtgaacgggcagccagaattgggatggctccttcttctatcagcatctgcgcacacagcgcaccgataccactcgatgcacctgtgataaacactacctgatctttcagcatccgtgatgtcctcccgtattgaacacatattgccttttgaggcgtatggttctattctacgagatcatgacctgaatatccatctcaccaatgccgtccatcagcaaaggaatactcagtgctttcgttgcactaaatgtagtcagatgttcggacttcatcacttgtggaggtgtaatatcgaccacaacaccctggtttgacaggatcgtgctggcgttaccactgatcatattccccagttcggaaatcgcacttttgctcatttcatccatttctgtaatgacaaatccacccatcatcgcagatacaattttcaatgcaacttgttcattaattccaaatacaatgtttccgctaagttgtccggtcattccgatcacgatccagacatggtctgcaatgtactctacatttttcacgccaagactcccggtggaaggcgaaacctggatgagctgttcgaatacgttccgtgccgattccaggaaaggattaatcacttccgctttcactgtctatgtccccctcgcactgggttattggtcacacaccaaaagtcccatattcattaaatttattatactttatcacgtacaagaattcattaagaattcgttaaaccatgtgtactataatttatcgtcatccgtggggcaaatgtttatagctgattctagcgaataaacagcgcttttcacttcttttgaagaaagcattttgatcatcgtgcgtggcaaagggcatttaggactttattactgctttctcacaactgtaaaaaaaatcaaattcttgtattcgcgtttttttcacagtctcttgaactacttttgatcctgatcattaccttcattgctctgctgtcctgaatcacctataatttaagataacggaacaataaccagttacgggattacatcacactaaacactacataatcaagaaattttgcctgcaaggaggtcacctatgaacataagccaactggagacactaattaccatttccaaaacgatgagcttccgcaaagcgggagaacttctgaacctgacccagcctgccgtctcggcccagatcaaaagtctggaggacgaattcagcaccgttcttgtggatcgtaaccaacccgttaccctgacagaccgtggacaggtattcctggagcacgctgaacggatgctcgacatcgttgatgagttgaaacaaaaattgtccgatcttgatgaaacgcctcagggacgtatcgtattaggcacaacaacttccattgctattcagatcttgccaagggtgttatcctatttccaagatcaattcccgctgatcaaaaccagtatccagtcccttccttcatcacagatctatacccaggtcgaaaatggtctggttgatattggtatcggttatctcacggagcgtaatcccaacctgaatacatctgtgctctactatgacacatttgaactcgtggtatctccttcccatccgctggcaaagaaaaaacatgctgcagtggatgtgctccggagtacaccattgattctgctgtcccctgataccgtaggacgaagatttacagaaacgatcttcaagaaacataatattgaacctaatattgtaatggagttgtcgagcagcgaagaagtgaaacggatggtcgagattgatctcggggcagctgtcatctccaaacaatctgttgcgcatgagttgcgtcaaggtacattgcgaatgatacccttaagtgagctggaggtcagtcaccctgttggtgtcatctataagtccagtcggtacctaaattcagcgatgcagcaattcataagtgacctcaaaggtatgccggaaacccaattcatcagttcagaatgacaatgagccatgagaaaggaaggattccatatgaaatttgatcttcatacacatcattttcgttgtggtcacgcagacggcaacatccgcgattatatagaggcaggtatcgaggtaggacttcaggccatcggtatctcggatcatacgccatactttggcagtgagcttgagcaggcatttccccggatcgcaatgggcaagtcggaactgcagcattatgtggaagaagtccttgctttgaaagaagagtacgctggtaaaatcgatgtactgctcggcattgaatccgactacttccctgctcatgcagaattgtaccgtaccacgctgggacagtatccttttgactacattattggttcagttcatcataccgaggatgtgagtatcttcaacaaaacccggtggaatggcctaagcaatgctcgcaaagttgaagtgaaagaaagctattattcattaattcgggaatcggctcgcagcggtatgttccagattcttggacacattgatgcgatgaaaggaaactatccacctttctccgaaattatcgctgatcaggctattgatgaaacgttgcaggtgatcgcagaatccaacgtagcgatcgaaattaacacatctggcaaaaccaaactcagcggtggctggtatccctcggatgccattctggaacgcgcccatcattatggagtgaaggtgacatttggatcggacgctcataaaccacagcgggttgcagacgagctggatgacgttcgtacacgtctcaaggagatcggattcaccgactgggtatacttcaagcagaaacagatgcaggttgttccactgtaaaaaatatagcaaacacaaaggcccccacagcgcgcttgttcacgccgtgggggccttttattgccctatataaggaaatataattatattttacacgataacggagaggacagaaataacgtgaagaagcgaagcggtcgcctaaaagctttctgaaagaaagctgcatcgggagcatacgctatccccggatttccccttctaaaatataggaatcaaaaaaatccgggtataacagcgatcggaaagttattctgtcatcggagtggccagtgtaaatattccacagttaacttatatggacaaaaaaaatgaacccgctcgcgcgggtcccaacagcattatctattatcaaaaagggggtcatgagataagtttaccccctgtctgttagagttcaattgcagctatatttcaattgtgtaacaaatgattgagtttcgattcattcacgtttgactactcttactctatgtcatttcggcttgtcagataccagagtttgcaggtctttttcctgaagcggtctgacgtattgttcccggtacatactgtaaactttaacatccatcagggattctgatcccacgtcatcctcatcattcagtccgaacgagggaagactccgctcataggacatccctattttgcttagcacccgttgtgaagatacattggcctcataacaacgtgcttccaccctccccagatgaagatcgtcaaatccaaactgcaacagccgctgtaccgcctcggtagccacacccctgccccaacaggacctgttcaggatataaccaatctgtgcggtaccattctgatcattccagtgctggaatgaggtgatcccaatcacttgttccttgcctctccagcagatcccataatgtaacgaatccagcttggcgctgctgctccgtatctggttcaataaccgtctcgcccggattggcgtgggctggcttcccctgttcacatatcttatgacttgaggatcggaaaagagttccgataatgtgctgtaatcactttgacgtaatgatcgcaggacaagacgctctgtccacaaagccggcaggccttgaaccagcatttttcgggtaagcatgacaatcgctccttttgcctaaacgggctctagtccggtaagacaagcatgctctgatgatgatccggcgtaataccatttgaactgatccacgaactttagtattcgcattttagtattaatatattgcatcattcaattcctcacgctaaaaggcccagatgctgactactcttgcagcccgcgatagatgcccgtacgaatctcacggatataaaaatccaatgcaggaacattcgcggattgtgcaacctgtacttctcgctcaatatcataaggcactcgcacaaattgaacattgaacgggatattgttatcgttgctgtcttcaccctccagaatacagtaggaagcctggggaagatcaagtggattaccgacactgcctgcattaaacagtaacttgccgttcatatactgcaagtatgcgttatgcacatccccataacccacgacatctgcaacaccttgctcaggcttatcagccggaggatcaaacatggccaacctcttttccatcgcgtcccacggctgcacacgatggtatacactttgaggtgaagcatggaccagacggatggtgcgaccgctcagttgaaattggtgactgaagggtaggcccgccaagtacgccaatcgttcctcacccagccgctctgcttgccacgtaaagttctcgttgtcttggttaaccgcaaccagttcatcccaattgccacggataacaagttcgcacgtcgctctcacctgatccacaacctgtaccggttctggccccttgcccacgaggtcaccaagacaaaagattcgctccacgccacgacttcggatatcttttaacactgcttcccaggcagtcatgttgccatgaatgtcggatacaatcgcaattctttccatctggataacctccattcatgttcaatcctttatgttttaaattcatcttatattcttttatgtggttgatcctttaagctcaaacaccgttaattctggtctgcacagaaaacgaatgggcagttgagtcatgccaaaaccacgattcacatacaccggcatctgtgtctgggtggtgtaatataccccctggacatccgtgtaatacaatccttgaacatacttgtgtgaacctcgcggagttgtcagtgccccgatccagggaaaacgtacctgtccaccatggctatgaccggaaagttgtaatccgaaaccatagggagtggcaatgtcggcataatccggttcatgcataagtaacaatttccacacatcatgatccaatcccttgatagcttgggcaggatcaggcctgcctgtaagtgcgtcatccagtccagctatggccagacgttcgcccccttgttcaatcaccacatgttcgttccgtaacaaagtgaatccagcttcacggaacatggttgtcacttcattctgctgtccgccccgataatcatgattccccaaaactgcaaatttgccatacttcgcttgcatggaggcgagtaccggaatacattcacgcatcggctctgcttccctctcgactatgtctccggtaaaacaaatcaagtccggttgctgctcctcaatcgttgctgccagctttttcagctctttcaccccggtatgaaaaccaagatgggcatcgctgaactgaactacacgcaaaccgtcaaatgcctttggaaacttcggaagtttcagctccacttgcttgatctccagacgacgcggttcccataaccaggcataacctcctgtaagcaaactggcacccgctgtcatcaaaaccatacgcaataagaaacttcggcgagagggatcatgatccttttcttctccaggaaacacagactcttctgcacctgatgctttgtgcgagcgctgggacggcgagttgttgctgccctgacgcggtgtctctgccatatctccccctccttctacgctcttaatccatccccttagtatatcatattctgcatgggtagcccggttcctctgcttcattacaaaaagaagccgggatctccggcatgttgctgcacgggatcacgacttcttctaagttgcagattacacttctgcacatgttatgacgagattatacacccaaccagcgtttgaacatatgcttggtcgtttgtttgttcatttcggcaatggaggttgtcagtggaatgccttttggacaggattgcacacagttctgtgagttaccacagccctcaatgcctccgtcttccatcaacgcttccagacgatcgtcggcgttcatctcccctgttgggtgagcgttgaacagacgcacttgagacagtgctgctggaccgataaagtctgttttctcattgacgttcgggcatgcctccagacatacaccacatgtcatacatttggacagctcatatgcccactgacgcttcttctcaggcatccgtggacctggaccgaggtcataggtaccatcgatcggaatccatgcttttacgcgtttcagggcgctaaacatccggctacggtcgatgaccaagtcacgaaccactgggaatgtcttcatcggttcgatacgaacaggctgttcgagcttgtcgatcagggctgcacatgcttgacgtggcttgccgttgatgaccatggagcaggcaccgcagacttcttcgagacagttggaatcccagcacacgggagcaatggatttgccatctgtattgaccgggttccgctgaatctccatcagggcgctgatcacattcatgttgggacggtacggaagctcaaattcttcgttgtacgaagatgactccgggctatcctgacgggtgatgataaacttgacggttttgttggctgtagcttgttccgccatatcgttgtcccctcctctggtgacgatgattgtattgctgatgcgcaaaatggtttggtgcacgggagacgcttcgtcagcggaatgcccctctgatcgctgttatccccggatttttttgatcaaccctttccagggttaaaatccggtgataaaggcgagcgcttcgcttcttctgggcatttccgcttcctccgctacgtcgtgcactgggtcactttgctggaaaactgcactccattcatgctggatgggcagtattgaagttctgaagcatcgctaaggcgctttgcttcttctgggtatttccgcttcttccgctatgttgtgcactgggtaactttgctggaaaactgcactccattcatgctggaggcagtattgaagttctgaagcatcgctagggctttgcttcttctgggtctttccttcactttgatggcagtaactttgaaaaagctttgcttctccaaagttctcctgcctctccgttcaggtgtttaactattcattacatgaatagtgtgatacttcttaatccttggagtaatcccggatacgtggtgggatcaaggatacgtctactggctcgtacgagattttcgggccttccttcgaccaacttgcgatagtcgttttcaggaactcttcgtcattacgttccgtgaattccggtttgtaatgcgcgccgcggctttcgttacgcagcagtgcaccgagagtcattgcttctgccaattcaatcatgttccacagttggcgagtgaatgctgcgctcgggttattccaaccagagctgtcatacatgttgattttgccataacgctctttcaattccttgatcttgccaatcgtggcttcaagcttgtcgttgtagcgcacaaccgtcatgttggctgtcatccactcgccaagctctttatgaatgacataggcattttccgtgccctgcattttcaagatgccttcgtacttgtcgctttgttgtttggtgtgtttctcaaatacggaagatgggatatcagcggacgattttttaagtcctttgatatattcagccgcttttggtccagccaccataccaccatagatcgcagataccaatgagtttgcacccagacggttcgcaccatggtattgatattcacattcaccagctgcgaacagccccggaatgttagtcatttggttgtaatctacccacatgccgcccatggaataatggactgccgggaagattttcattgggattttacgcgggtcatcacccatgaacttctcatagatctcaatgattccgccgagtttaacatccagttccttcggatctttgtgcgacaggtcgagataaaccatgttctcgccgttcacacccagacccatatctacgcagacgctgaagatttcacgagtcgcgatatcacgtggaaccaggttaccgtaggatggatatttttcttcaaggaagtaccaaggttttccgtctttgtacgtccagatccgtccaccttcaccacgcgcggattcagacatgagacgtagcttgtcatcccctggaatggctgttgggtgaatctggatgaactccccgtttgcgtaatttacaccttgctgatacaccgcacttgccgctgtacctgtgttaattacagagttggtcgttttaccaaagatgatccccggaccaccactcgccagaataaccgcttctgccgggaaggtctgtaccttcatcgttttcagatcttgggctacgattccgcgacaaacgccttcatcatccaaaaccgcctgcaggaactcccagttctcatatttcgtaaccaggccagctgcttcccagcgacgtacctgctcgtctaatgcatagagcaattgttgtcctgttgtcgctcctgcaaatgccgtacggtgatgcttcgttcccccgaaacgacggaaatcaagcaaaccttccggtgtccggttgaacattacgcccatacggtccatcaagtgaatgatgccaggtgctgcttcgcacatcgctttaaccggaggttggttcgcaaggaagtcaccgccgtataccgtatcatcaaagtgtacccatggggagtcaccctcacccttggtatttaccgctccgttaatgccgccttgtgcgcatacagagtgggatcgtttaacaggaaccagtgaaaataaatgaacatggactccggcttcagccgatttgatcgccgccatcaatcccgcgagaccgccgcccacaataattacattcgttgatgccattgctgttcactcccttataagtcagcatttatacgctaaatgcttaaattagaactgtttttactgcgtcaatcatcgaagtagctgtttggaaatcaatgctccggaaagcaaatagtgaagcaataaacatgatggaaacaatagcgaacaagctcatacatacgtaagaggatacacgctgcgcacgcggaccaactgtaattccccagctaacgaggaacgaccacagaccattggcaaagtgatatgacgccgcaaccacactgatcatatatatcgcaaaggttatcggattcgtcaccgcatcatgtatgacgccgccaatctcttcatgggatacattacccagcgcaatctgtactcgcgtctcccatacgtgccagatgacgaatacaaacgtaataataccgcttaccctctgtaacgtgtagcgccagttgcgctcattaccgtaacgcccaacgttaggcttggcctgataggcaatgtaaagaccataaacaccgtgatagaacaacggcaaccagataagtaatgcctcaattacaataacaagaggcaaaccgttcagaaatgcaacggcaccgtaaaaagcttctttgccgccttcaactgccgtgaagttcgtcaccaaatgctcaacaaaaaacaaactgagcggaatgacgccaagcaaggagtgcagctttctggagtaaaaccctttcataaaatgtcgatcccctttcgctaaatacaacgttttcataaatgatttcacttatcatgacacgaatccttttccatgaaaaggttcgacaaattgttccgttttccccaggtgtgaacaacttgtgtcacggttcatgttactcctttttttcttataagggaattgcaatataattattaaatgttataacctataggtataagcagtgaaacattgggtttacaggctatacaacatggaaaacgattgagcaagggcaagaatcacattcatggaaaagaggttattgttcatgtttgaggagttaaatgcatttgcagcggtcgtggagcagtccagcctcaaccgtgcatccaagttactgaacttgtcccaacccgcactctcacgcaaaatcgccaaattggaggatgaactcggagttgccctgttccaccgccgtggcaaacggctggagttaaccagtgtaggccagttcacctatacctacgctgtagaacagaagcagcaacaacagaagttcctcaccatgctggcccagtataaagacgaagaacagagcaccattacacttggagccagtctgacgacgcttcaaactacgttaccacctctcgtcaatgcctttatggagaaacatccaaatgccgaactgaaactgttgacgggtaaaacacatgagattgtgtcgtttgtgcgtgacaaaaaagccgatgtgggcattgtcgcctcctccatcagcgaagtggggcttaactgtgtgccgctctttgacgatcacctggaactggttgtgccgcttacacaccccttgtccggtaaagaagccgggatggagcatttgcaggatctgccgatgatcacgttctccaaaggcacctggtatcgcaaattaacggacgatctcttccagcgctgtgccgtgatgccggatattcgcatggagattgattccttcgaagcgatcatccgacttctgccttccgccaaagctgctgctctattgcccaagtcatatcttcgtccacaattgctcgcggacaatgatcttgtttctgttcatttgcctcaattacagcagacccgcagaacaacttgtatgatctatggggaaaaagaggacctcagcgagacctccagacaatgggtcaaggagacggctgcactctttacagcaaaggcgccattgccctcacggagggctacgacgcctttgccttgatctgaatcagccaggctctaacgcctggcttccatatttaactcatgataattatcagctctcttggctgataacctcttcttcaaatcggtcgatatctgcattattaccaataatgaccatgatatcccccatttgaagcgaatccagtgccgtcggagcgataatgaccccagcttccttctgtaacgctacaatgctgcaaccaaaacgtacacgtgcattcagggtggaaagggttttgttgtgcagacaggcgggaaccttcatctcgacaatactgtaatcattggataattcaatgtaatccagcaagttcggggtaaccagctggtgggcaacccgaatgcccatatcccgctcaggataaacgacacgatcaatccccagtttatccaatgcgcgtccgtgaaggacggatatggccttggccacaaccgtcttgacgcccagctcttttaacagaatcgcggtgagaatgctcgtctgaatatcatccccgatagcaacgatacagcagtcaaaatttcgaatacccagggagcgtagcacttcctcatctgtggcatcggctacaacggcatgggtgaccaattcactaatgtcttcgacgacttcttcatttttatcgatcccgagcacctcgtagccgagttccattaattcctgtgccagactggagccaaatcgcccaagcccaatcaccgcaaactgctgtgttttcattgttcttcacgaaccccttatccaaatcaatttcaaaactcactaaaaatagatttatccaataatcattttgccttccggatacctgtataactctttaccctttttctgcccaagtgcatacgctaatgtaatcggtccaagccttccagcaaacatcgtaaaacaaatcaagagtttgcccaatgtagtcaacttcagcgttagtccaagcgataatcctacagtaccaaaggccgatgtcgtttcaaataagatcatcataaaactggcgtcttctgtggtactcagtgccatcgttacagctatgatgaacaaaagcgccagcaatgtaatggtaagcgccttgaaaatccgttcctgtacaagccgatagcggaaaaacacgatatcttcacgtccacgcatcatggcgatgaccgctccagccataatcataaatgtcgttgttttgatcccgcctccggtagaacccggcgaagcaccaatgaacatcagaatgatcataaagaactgtgttgcctgtctcagcccggcaatatctaccgtattggctcctgctgttcgcggcgtaacggactggaagaatgaaccgagaattttgccaccccagttcaggccacccagtgtccgtggattgctgaattcaaatacgaaaatgacaagtgcaccaaacacaattaacaatccagtcattaacagtacaactttggagtgcagagacagcttccgcgttttgcggtaatccaccaggtctgacaacaccacaaaaccgataccaccagagacaatcaggaacattgctgtaaaattaaccaacgggtcatacacataaccggtcagactgcgaaaatccccaaacatatcaaagcccgcattgttgaacatggagatcgcatgccaatagccataatagatcgcctgtccaatcggcatgtcgaacgaccagcgaatggcaaacagtgtgccacatatgccttcgataatgagtgagtagatcacaactttacggatcagccggacgatgccctccatcgtgctctgattcatcgcttcctgtagaatcaaccgttctctaagcgaaatccgccgtttgaacgcaatggcaaccaatgtggacattgtcatgaagcccagtccgccaatctgaatcagaatcgcgattacaacctgacccagcaccgagaaatgagtccctgtatccaccacaaccaaaccagtgacacaaacagccgaagttgctgtaaagagcgcatcaataaatgcaagactgtctccgttacggttggatgccggaagcattaacaacattgtgcctaccaatatgatgccagcaaaccctaacacaagaatacggggtggcgataatcgcatccattgcacattcagtttcacttgagtatcttccacctcttctaaaatgaaaataactccacacccgtggagcgttcttcatttgaaatgctgttgccaaacgttaaacaagtatgattcagattaaaacgacatatataatgaagttggaatatatcctattcgttcccttgttgggcgaaagacatgcgaatcattgcacatttgtttcaaaattataagcgctgcgacgtttgtagacaaaacgttttttgtgtaaatcggatcgaattcagccaaaaagggaagaactcagatatggcgacggatggatcagattctttcggtccttttcattcattttcaaggatttacacctgttttcgttacatcattggcattcggtgcttggcctgtgctatgttaactttaatatccatattagtgcgtgttcaaaaagggcggttttcagtaccaagaagatgggatgaagatagatatggagtagcggagcgtagatcgagctacgtgagcaacggacatttcggctgaattccatattcgatgctgatgatgccgttaggcaaccttcgtaatcaaaagcggactttttgaactacctctatcaataaaggaggaacaccattacatgaatcccttagggcagcctttgcaactcaaggctaacttcaagcggctggggttgcttgcggcgattggcctgattctattttttgtatttcagatctttcctgctacctcatcgcaaacgacagaaatttcatccacgtccttcataaccaaggagcaggcgaagcaatccgcacgatcattcgcagcttctgtgaatgactatacactgccaaatgatgatgcaaaaaccctggtcacctaccagacacattcggatatctacggatatatggccaaaaccaaacaacttgatacctataaccagaaatgggaaacaagctatccttacgatgtattccgcgttcgtttgcctgatcaacacaaaggcggatatcttaatgttgacgtacatatgaaaacaggaaaagtcgtcggcttcaaacgggaactgccttcttcactctataccgccattgaggcggagcaggttagtggacgagtgaccacatcgcaagtacttgctgaaggcaatatatctctggacgagaaacaacagctcgcggctggcgttctgaccgaattcggttatgaagtgccggcacttcaactggagactcgcgatggtgaagcgggactgaagtatgtggattctgaaaaagccattggagactctaagcttgaattgaattttacgtttgaagagggtgcggtacgatccttcgatcctggattctctgtccctgaatcccataccgattatgtgaaagatcaaacgcgccaagctaattggatgacctatggcggctatgcattcctgacctttgttctgggcgtgctggcaatcatctatagcattctgacccgagcacatacgtctttcaaacgcgggatcattctctcgctggtgtatttcgcagcttcggtaattggtacgctgaacatgattccactctttcaggcacaagggctctccagcttcatgttagcgttcctgatgttaatgcaggcgggaattacgctcgtcatgagtgcaaccatctatctgtcccttgttgccggtgacggcatgtggcgtaaaataggtctgaacccatggcctcgtgcgaaagaacccggatatggaaaatatgtacttcacagtatgtatgctggttatctgtgggcattcattctactgggtgtgcaatccatcctgttcttcattctggagcgaagcattggcacatggtcaacaacgtcagcagatcaatctacatttaatatgacctatgcctggctcttcccgatcatggcctggatggccggtattggtgaagaaactgtttatcgactgttcggcattcgcatgatgcaaaagattgtgcgtaacacgtttattgcctgtttgatcccaaccatcatttgggcacttggacacacattgtatccgatctatccagtaatcacccgtcccattgagctgatggtgattggattgctgttcagtctgatcatgctgcgtcacggcttcattgccgttgtatttgcccatgtgatcttcgacagcttgctgatgggactcagcttggtctttatgggcgatgccctgaatatgacagctggactcttctggattgtactgccggccatcgttggatatgtggtctacaaattcaatccaaaacaaaaagagaagccgtatgttacgactcctcatcccgaagtgctgcaataatctgatttgccagtttgtcaccaatagatagaggccggaagtcttcaacgctggcctcttttattttgcgcaaagagccaaaatgcttcaacagcagcttacgccgcttctctccgatccccggaatggcatccaaacgggacgtcaccatcgatttaccccgctgttcccggtggaacgagatcgcaaaacggtggacctcttcctgtatccgctgcaacaggtagaattcctgactatcccgtggcagggagatgacttccggtggattaccgatcatcaactgcgaagtcttatgcttcgcatccttcaccagaccacataccggaataaacagccccagctcattttccaaaatatcgaccgcagccgagatctgtcctttaccaccatcgaccacaatcaggtcaggctgggtcaggttttcttttaatacccgttcgtatcggcgacggatgacctctctcatcgtttcataatcatccggcccttcaaccgaacggaccttgtacttccgatattccttcttatccggtttaccatcggtaaatacgatcatggcagataccgggtttgtaccctgaatattcgagttatcaaacgcttcaatacggtgaagctgatccaatccaataaaacgtcccagtccttcggcagctttggatgtacgttcttcatttcgctcaatcaaacggaacttctcttccaatgccacacgtgcgttgtccacggccatggtgatcatctggcgtttcaatccacgttgcggaatgagcactttgatctccaaccactcttgtaaagcagcggcaacctgagttgggtcttccagtcctgatggaagcttttcagttgaagcagttgtatccgttattagagcatcctcttgcatactgtcaggttgttcaccttctgcctcagcggaagctccgtaagttgcacgagtctcagcaaccagtggctgggaagcgttactatgctccacttgtcccgcctgatcgaactctaccgtaactgcggcaggtaccgatccatcagtatcagaacccgtatcaacactatcattatctgttgcaagatccttgggcatttccggtaacaaaatttcttgtggtaatgccggattatcgctgtaatactgtgttacataggacatgaaatcactgtacgcctcaccgtaaaacgggaaggtggagacatggcgttcgatcattttaccctgacgcatatatagaatctggacacacatccagcctttatcaatggcaaaaccaaatacatcacggtctctggcatcggccatcgtaattttctgtttttccatcatcgcatcgatggcgattacctggtcgcgcagttccttggcacgttcaaaataaagatcctccgcagcctcttgcatcttacgctgcaaatccttcttgatctcttcgtgaccaccactcagaaatgaaccaatctcttgggaaatctggtcgtactgctccttctccacttccttcacacaaggggcaagacactgtcccatgtgatagtacagacagacttctttgggcattacaccacatttgcgcagtggatacatccggtctagcaattttttcgtttggtgtgccgcatacgagttcggataaggtccgaagtatttggctttatctttcagcacacgccgggttacttccagccgggggtgcttttcattcgtaattttaagatacgggaacgtcttgtcatccttgagcagtacgttataacgcggcatatgttttttgatcaggttacactccagaatgagtgcttccatgttactgcccgtcacgatatattcaaaatcacgaatttcggagaccagacgctgggtctttccgttatgactgccgataaaataagagcgtacgcggttcttcaacactttagccttacctacatagataatggtgccttcactattcttcatcaggtaacatccagacatgtctggcaacaaagcgagcttgtgacgaatctgctccaatgccttctcctgatcctgcaaatcattgatgaattgatccataattcggtgaatcctccttcccgaaaaaagtataaataaaaggttacactaagccattctgattacagtaccgtcttccaatccgttatcggattgtctctgagtcaccttttttataagaagaaactaaagataattcacactgacactacgatgtcagaacaaccttccaatccctgttatccccagatttttttcattcccttttctcaagggaaaaatctgttgatagcgtatgcttccgatgcagctttctttcagaaagcttttaggggaacgcttcgctttttcaggttttttctgtcctctccgttactgtgtaaataattagttccatctatatatcagagatgaatccgggataaacgcgagcacttcgcttctccagatcggttctgtactctacattcaagtgtaaaaaatatttttactttatattgtcctatataaaggtattcgacgcaaaacgcccccggcatgtaaaccggaggcgtatgtgtaagcctgtaaattattggtgttttgcgataattcctttgagcgcatctttcgagttcagaccaaccactttatctaccggttgaccgtctttgaagaagatcaaagttggaatgctcattacgccgaagcgggaagcagattccggattttcatccacgttaactttagcaattttcactgcatcgccaacttctgtggacagctcttccaggattggagcgagcattttacaaggaccacaccaaggcgcccagaaatcaacaagaaccgttccttcgccttctacttcagcgttgaaggattgatcggatacgttaacaatagccatgaaattgtcctccttatatatacttacggtttattttaacctgtaacgtcgtgaacgacacttccagtataacacaggtacgtcaaacttgtgaattgaacgctgcaatgttcatcttcccaacatcaaatcttcacaattacaggatgtgggatactaactgcaaaatctttacaaacgctttcttttccaagtatactaaaattactccgggtttcagcccccatacgggcaagctgtttccccataaggaggcaataacatggatgcaaatgtgcggatcagcgacccgcgtgaacatgtgaacgaggaaccccgcaacgatctatttgatctgatcgcgggtgttgccggcatggccggcctgatgacagtgatctttttcggtatggttatcttcaaattcctcaccgaataggacactcacaggtctcacgcaggaccagaaaagcccggttttcgcgacaatgcgaaagccaggctttttttgggactactttagcttttgactgcaatcagctcagcttctaaatcgtaagctccaccgataatttgaagattaacttgtccagaaccatttcgttcaattagatcggttcaacgtttaccgcgctgattctcaccccgaacggagattacatccacaaatggacgaatccggtccatgagacgctgccctttattcatttcctcgccgtcccgattggtgaaactaagatgtttttcaagcccatccagattgtaattggacgtatagaacgttggtttgcgattcatccgatagttcagaatggaccccatcacatgatctcgaacccaaggattcagattctctgccccgatatcatcaaagatgagcagatcacaacttttcaaaatatccgtcatttccttcagcttctgcccttcactgatcatggatttcagatcctccacaaagtcaggcatatagataatgacacccgtgtggcctgcaaccgccagttcatgcagcagataacacatcagaaacgtcttacccgtcccgaatgttccttccagaaacagtccttgcggagataatccattctccttggtctccctaatataacgaagcacctgatttactgccggagcacgcatccgatccttgcccataatctccacgtcgttgtatccggcactgagcgcacgctcgtccacatagaaactgcgaatgcgttgcttaataatatgttcattttgccgggcgatatgtttggaacaaggcgcttttatatctatgatttcgggtttaccgttaaaatgttctacttccagtttgcaaaagtggccctgaaaatcgttagggcagttgtcgagtcctgggcaattcgcacagttcttagagtctttggcgtactgaaacagcttgctcagatcagtcatgagctgtgcatcttgcagttcaggatgacctgcgcggaattcgcgtacgtacggattttccatcaattccgccgcaatccgccgcgattgctcacgaaaggcagggttcagctgctgaagcagtcctcccaaggattccatggcttcaagcccccttaatgtttcaatatagaatgaacaatgaagtgtacccctgaccatcttgatggcataggaactttcgatcatttgcaattctactgttcattctatagaaaaacaaccaataactcaactcatagatctggtaaatagcgtaacccttctgccaccgtacgtaatgcctagtttatagtacacttgcagtcctgtaccttttagtgtgtgttcaaaagtctgtttttcgactctttaaacaactttgatcagcggcgcaagccgacagtaacgatctcgcatgaatctgtctgtatgttccattccttggtggcaaatgataatgttgatgcctcttctatgctgttaagatgaagtatttcgccctcttcctccaggatgttgcttttgtatgccgtttcgaatggctgcggattcgcttgtgatgttgcaagcttcaacgtggcagagtcggtggtcatattgaaccagcgtagcatgacatcgccggaatcctcatttaccttgagtgaagaaaacgccaatccttccccttgccatgcaaacggtgtgttgttaggtgtcagataacccgtgtgtacttcggtttgtgccagcgtccaaggaacctggaactgatacgcctcaatatatgcacctgatgctgcaccatttccatcatgcggaatgatctcgatctgaaatgtatgttcaccaaggcattgtgcttccggtgtcgggaacaaaccccagtctccgagttcgcccacagcacgaagcagcgttacggcgatggtgttacgtccatcttgaaggacttcatattcattcagacccagattggctacgaccaatcccgcctctttttcactcacatccacaaaattctgttgatgctgtgtattgcttggattttgccactccggtgcaggcttgttatcacgcgttgcaatttcgaacatggaatccacatgatgaacagcagatacaagatcggttgggaaaagagcacgtacccgatgatccttcgcctgattgttgatggttgtttccacttgtactccttttccactacgactgagggatacaaccgtgcgaatctggagcggaatcatcttcgttgaacgctgggctttgcgatgtggataataaatcagttctcgctgttcctgatccagcatctcatctgctgactccggtatttcccaatgaagaatcacttcgaacgaggccaagtatgatgtatcctcaaggattcgaatctcagcctgaagtgcttcagttgtccgcgccacttcgttctctggctgcttgaacatgtattcattgcctatatcgcccacattttcgtatacgccaaggtccttgtaagtccggcctgttcgtttgtctgtgagtgtgaatgaaccgttgtctgcaatcgtgacgatcaaatgttgattttccataccacgttcaccacgcaacaacgtatttgttttcggttgagagccactcttggcatgatccactgagttcaccaacgcataagtcttcaagcccaatgctgctacatgctctgtttcaaaacgaatacgaacgcgccgacagctatacggctggcggaagcgatcatccggcagatcatagccaaattgcagacccagatcctccaccgtacatggaatggggttaccattttcatctacaagtacgcggtctgacaggtcaacggctttcatctgcgtcgccatctcttccaacgtatgtccatcccggaaatacaaccgagccgcgtccagttccatctgaactacaccgctgcgttcccaacccgttgtattaaataccacaacaggtcgagcctgctcgccgtaacgctcaaatatggaggtatcgacagctgtagtaatctggctggtgctctcttcaattaaagcctctgctacatgacggctcttatcaaaccgtgtcaccatctcgcgatgcacctcatccacactgcatccacagatgctgtcatgcggatgattttgcatcagcgttttccaggcatacgtcagttgatcatgtggataggcatgtccaagcagataggcgtaggatgccaggggttcagccactttttccagcatagtctggcccagctggttcatctgtttcagatacacacgagccgaggcggtgttcaccagagttccccagccatcggtacgctgactgcgcaattcgcctttgaccgtggacagttcatgttcagacgatgctctcaaagcttccagataatccggaaagttggagtgaatgaactcgatatcgggatgtaattgttcagccatgcgaatcgcttctggcagatctcgctgaattggttgatgatcacatccgttcatgtacaacaactcattggtcgatgcatatttctcggcatctgcaagcttggtttcccagaacttgcgggccgattcctcgtctactggaacttcatttccgttggagtaccagttggcaaacaatacgccgagtacttttgatccgtctggtccttcccacatcagctccgagaagcttgattcatatccggcatccgataccgtattattaaatccggtaggcttcacaccacgtccaaaaaacacattatcaatgcctgattgttgcatcagctgtggagtctgcccgaccaatccaaatgtatcgggaaagtaaccaattttcgaaggggtgccgtaacgtttggcgtccttatgtccaacctgcatgttgcgcacattggcttctccgctcgtcagaaacgcatcctgcaaaatgtaccatggtccaatcacaatccgcccattgcggatatgtttctccagtctttccttctgctccggtcgaacctgaagatagtcatcgataataatcgtttgtccatccaaataaaagcttttatagtccgatccctcatcaagctgatccaacagtgaatcgacgagctgaataagacgcatatgatgcttctcatacggcaagtaccattcccgatcccagtgggtatgcgaaataatatgtgctctctttttcttggtcatcgtgttatcccacctctttcatcttgttgtacaatctcaacctcatcagggcgatacaccgtagtcagctttccggaagcatccgtggcaaacagcaccgaacgatttttttccagttggaacgcatacgatacacctgtacgttgatctctcacgtgaacttcatggttcaaggcaaactccgatacaaatacatacagatttccttttggaaaactcaacttccggccgtagatcccagcgatatccccgccagatatccattccacctcctgttcgatgcccgaaatctcggttgcataacgatacaattcagcaagtggctcgtcccgtccatttaactcgagcggcagtggagtccagattaatttccctttgcccaaaggcagaacgtgtacttcatctgctgtacctttatccccgtgaagcaacgtctcctttaccacctcggcgatacgacgccgtccataggtcacccggtgattcacgccattaatattcagcaattcttcccgctgtacgttacccagactgcgtttacctacgatatgatcggcccggtcagttgccttccagtatgcgtccagtcccagcggccctgtaatgagcaggctcgtgccttccttctccgcaaacgtgagcaattgttgaagtgcatcgctctccatattgtgcggactcggtacgataatcagtttcggtggctgctgctccaacgcttccagatgatattcggataacgcacggaatggcaatttcagatcataagacatcacgcgagtaagctttgttgtggcatcataggcgagggcacggttggagaagtcattggaatacgggaacaccactgcaatatcctccagatcgcggtcttcaaagagatcacgaatgccatccatgaatcggccaaaatcataagacacatccgcctcgggtttctccgtaccatctgcacgaagggccccaatatgggactcattggcattatccatataaaagttggtgttccagatccattgcacggcgccagcgccgcctgtcgagaacgcataggcgtactttcgttcgagaataccacgaagctcttcttccgtacgcttagctcgcccatcgggggtttccacatacatgatgcccgtctcctgaatgagatttggcttatgtggcgttttagcgaaaatgccatcccagatcagatcatcgtttaaccaccaggagtgcacggttgtataatccacttcacgttcatagaagaaaggcgaaggacgctgtgcaccaagggcttcgtcctgtcccacagtgaccagatgattcggtaccagatccttgatcgtacctacaagctctcttgcccaaacattgtgcatctccatagagaagagacagtaatcgagccagcgtgttccctttttggccttgtgcatgtcctgtacatcaaaattaatctcttccgcctcggggatagccgcggctgcaaagttcggaagctgcttcggtgacatgttccatgcctcctgcaacgcttcaattgtctgatgccgctgctcaagccaagtgatataagcctgctgttcatatgaatcccttgccgagcgtgggccagccgagaagatgcgcaccggatcaaacatcgatggctcattaatcagatcccagtccacatgggttgtatgcgtgtgacgactgacgatgctgcggataaaacgtttctgagcctcgacactctgcgggtccaaatacggattcgtgccttcccatgtctccggtgtaaaggagaagaaggtgaatgtgacctgtaagccgtggcgttttgccgttaaaataaatgcatcaatggcacgaagcacatcctctgccatatgtccgtccacctgcatcatgttgcgataggcggtccagattcccgtccgaatccagttgatgccggcttttgccatctgagccatgtctcgatcccagacatccgcattgggcagaaataaaaatttccgtgccacatcggaggtcatgtaggtcatgcccacaacagggagagggcgtccgtcttttacaaaataatccctgctgcgggtaatcacttccccttctgccagcagtgcagcatcctgtccccagaagccttgacgcaaggtccgaacttcaccgtcaggagcctgcgcgtggcatacgatccgatacagcccactttcaatggataccgggagaagtatacgttcgaaacgctgctcaccggaaagttccatctccagtcgatggctccataccttctccgtcatgccacttgtgcgatcttcatgctcgactgttatgtcgaatgcccacagctcggactcggtaagtctgttgcctgctcgctgtaaaatctgaccttgaagtgtgagtacagcccgctcatctggctcatacgaagcataattcgttttgagggataactcagttacaccttgcgcacagaatagcgcccatttcacaatctcggcagcgccatcctgcgtccagaatgaggtggtcagcggcagatgtacaaacatccagcgtgaacctacgaaagtcccgcgcgagttttcccacagaacgaccggagcggcgacactgcgcccgtctttactcatgccacgaagcaatggataaatctgcgtactcatcggtcctgatgaccccatctggtggggcagatcacttgttttggttgtatgtggaaccaaattccatgtatctgccttctcaaacagcccctctttcccagggagaagcgggatctgttcggatgaagtgtacgattgcacattggcagaagatacgttcagtgcctcatgaatatagagttcctgatgatacgcggtctgctcggactctacaacccatgccccattttcatatcgaaccggacgtttgaagggtgcgccccccacactgatcaggcttccgccctgatgcaagtaagcggcaatctccgtccaggcggactttggaaaatagggtgcatgcagattgaccagacatccttcacctgctgtggtcttcaaagcctctgcgagttcttcggcgtttacaacggtgatctcttcgactgctttccatgtattcagagcctcatgacttggagaagcaccttccatcggaaacgcaggatcagcgaagataatcagctttttatcattaggttggatactcataacaggccatccttcatcgatctgtagaccaactgggagaacaggctgttggaccatgcaaaccattttcgtgtaaaaatcgttggatcatcggcgtggaagccttcatgcatataacctgtatctgcatctgtcgcttcgagcatgcgaataatctccagtttctcctcggcagactgcgcagtcagtccttgcatggacaatcccatatgccagatgtaatctggtggggtgtgcggacttccgatccctttggcaaccttgccttcataatagaacgggttctctttgctcagggcaaaacggcgcgtattctggtagatcggatcatccgctgtgacgtaacccagatatgggatggacatgagtcccggtgtacccgcatcgtccatgagacagtggttgccataaccgtccgtctcgtacgcatagatcggtccaaattccggatgacgataaataccatacaactgaatgccgtgatccacgtcctgctccagatccttcaattcctgcaaaagttccatatcccggaacacccactcggcaaactcctgcatctggcgcagagcgacaaccgcgaacatgttgccagggatattgtagtggaaatcacacgcatcatcactggaacggaaaccggaccagatcatccccgtgtagttgactggcataccttttccgtgattgcgcagggaatctgttgggataccgttattacgagtgaagcgatatggagattgttccatgtgatgctgttcgactttgaacaggtccacgattttacgcatcgctgccttgaagcttgaatcgaaaatgtcggtcagctcggtttccttccaatataaatacgccaaacgtacaacaaaacataatgagtcaatctcaaatttgcgttcccacacccaaggcgacatctcggtttcgtccgtggtgttccaatgccagtcgttagcagtctcattgaaggcattggcatatggatcgatgtgaacatactggatatgacgtttgatcagcccgccaataatgcgttgcaggtcctcgtcttcttttgcaaacggaatgtaatgtaccacctgctccacggaatcacgcagccaggaagccggaatatcccctgtgataacaaaagtcgtaccgtcctccatcaacttggttgttgtttcgatggtgttggggaagcagtttttgaataattgaagcagttttggtcggtgagccagtttctgttctgcttcttcgagcacggcctgaatggattgtggcaaagcaacaggtggcatgggtattttgggtaatctgaactgttccatggatgagtgcaactccttaaacaaattgaatggtatagctaaaaagataaacccattaactgtacactaggacactacgattgcagtaccatcttccgatcgctgttatccccagattttttttgattcccttctctaaagggaaaatccggggataaaggcgaacgcttcgcttctccatctggttctgcactctccgttatgtgtacatgtttaagttcatcttatatagctcaaaaatatttcaaaaaggtttaccgcagtagcacggtttgtatttcgtaaggtttaaaagataatgtaatctggccattggtatgggccagtggttggacgggttcttccagtgcgttggagtgatacgcctgttcaaaggcatgtggccattgcaatgtgatggtttcgcgtttgcctgatgattcatagaaacgaaggactgttccgtgcccatcctctgccattttgaccgtatcgagaatgacgtgattactattaaagttaatccaggagcctgttgctggacttacaggtgcctcaattgcagttgtatctgcaattagatcgactccagtccctgtgcttggctgtacctgctctatctggtgctcttgttgtatctgccccatctgttgcacttgctgcgactgttgcacttgtttcacttgctgtaccgtcacctcatgatttaactcggcagcctgacgtacggtgtgtgcagttcgccagtctccgtcatgtggatacagggaataggtgaattcatgttctcccagatcggctgtgcgatcaggccatttgggtgcacgcagtagggacaaacgaatggtgcttccctgcacgtcatacccgtacttgcagtcattgaggaggctcacgccgtatccatattcggacacatccgcgaagcgatgtccacagacttcatactgcgcttgttcccagcttgtgttgcgatgtgttgggcgttccagtgagccaaatggaatttcaaatgttgccttggaggtcaccacatcaatcgggaaaccaactttcagaagtttgtgattttcgttccagttcacctgtgtctggaagtcgatacgtcgtgaatcatgataaaagacgatatcttgtgtgatttccgattgatgtagcttccaatggaaacgcaggacatctttcgttgaacccgcaagcaccagctttttctccaacagttccacttcgccagcaatctgttcctcataacgactgtcgatatcccatgcatcccagagcgttggacgatcgtggaagaagtgaagttgattgcctcgttcacccggcttcagcatctcacgctctgcggttttatcccacagacgggtgatctccccacgttcgttgaactgcacatgataaaaggcagtatcccatgtatcattaaaggttgtttgtgcggcaaggttcttcatttcccgtacattcgtttcccttgtattttccggtaccagccaaatcgtcttatatccaaacgccggaatgtctgtcacgagaatagacatgttgccatcctcccgatccatccgcaagcgctggcctttttcatcgatgccgtagcgatccaagccatcctgcacaggaagttgaacgactgcactccgtttccagcccaggctgttgtatacaacataggctactgaaccttcgggtccctctgtgttgatacccgttgtcaatgctgcaatgccttgatccagtccggttctgcccaattcaaatacctgtacatattcctcattcgaagtgacgtaggactccgtaattgccgagcccggaataatatcatgaaattgattcagcaaaattaatttccagccctcatgcagattcgaacgcacttcagcttcggtattcgcatccatatctggcagagcgagtgtgttccacagctcagcttctcgatacaaaacctccgctttccggttgttgcgcttattgcgcgcatgggtcgtgtaggttccccgatgtaactccagatacagatcgccatgccacttcggaagtacaggttgctccttttcaattccggcaaagaaagctccagctgtgctataacggctcgcaggctgtccaaccatcaggtctgcgcgatccacatactccagcatctcgcgtgttacgccaccgccgccatctccgtgtccgtatagaagcatatgctccggatgagccgctttctcacggtaggactgccagtgatcatgaatgtccttcggcaacgtatgctcgttaacaccatgattgaggtaagacaggatcggtgtgccgtcaatgcccacccagtggaagagatcgtatggaaacacatttgtgtcgttccatccgagctttgttgtcatgaaatattccacattgccatgcttcaaaatctgtggcagggaggcacaatacccaaacgtatccggcaaccattcaatctgtgatgttttgccaaactcctccatatagaaacgctgaccatataacatctggcgaatcagggactccccgcttgggatgttcagatccggctcaacccacatacctccaaccagttcccagcgaccttctacaatccgctgcttcacccgtgcatacagctcgggatcatgctccttcagaaacgcatatagtaagggttggctctgggaataaacatagtccggatattcattcatgagtgcatccacggtggagaaagtacggctcgttttgcgtaccgtctcacgtacaggccacagccaggcaatatcaatatgggactgtcccaccatatgctccagaccttccgcgtttccgccaatctcacgcacatgatgcttcagattattctcaatctgacgaataccctcaccctgctcaatctcttctgctgacatgcctacaaattgatccatcgcacgatataccagttctaacaggcgaacccgccgaaagtcactttccggtagcaacacagccgaatcacgcacaataatgacggtatacatcagactacgaaccgcttcattgggtctcaccagcaggctcgtaattgatgtgatcggtggctgaataaccgcctgttgattcaacgggtctacaggttcaggtaccggatcaaacatctcgatctccagttctggagcgtttccgactttggatggatcaagcgtgacgtaggtatgattgcgatcaaggccctgataagagttcccatttacccgaagcaagccttctccgcctgtctcaaatacaagcccataaggtgtttgctgccatgtagcaggaatctccaaacgtgttctgaaaaaataagtcgttccctgtttgctcggaaaacgctcaaaatcttgcccttcggggtactcaccctgatcctcatactgtcctggcacattataataagcgcgggtaatgtcccagttgcgcagctgtaattgctccagccactgatgttcggacaactcgcgaataaatcgtctgatacgttccaacgtcttacgcctcccttacggtcagttcggctatttgcgtatcgtttacgctgctgccgatatgaatatggaattgtcccggttcaacgacaggcttcaaatcacgaccaatatactgcagctgctcggccccgatgtggaattccacggtctgtgtctctcccggctccaggttcacttttgcaaaccccttcagttccttggccggacgagttagtgagctgaccacgtcagagatgtacatctgtacaacttctgcacctgcataacggccggtgttggtcacgttcaccgataccgtaactgaatcatcagttgtcatagatgcagcactcagctgcggttcactgtactcatatgtggtatagctaagtccgtatccaaatgcataacgtggctccagatcctcttcgaggtaacgtttgcctcgggaacgtttgccgttataatagatcggtaattggccgacatgcttcggaatggagatcgtcaatttgcctgacggattcacatcaccgaataaaatatctgcaatggcacgaccgccctcttgacccggataccacgcctccagaattgcatcgacatgttcatccacccaaggttcagtgatgggacgaccattaatgtaaacaacgacaagcttcttgccgagcttgtgaatctcctgaataagttccaactgtactccggcaagacccaacgtcatccggtcgatcccttcgccacactccatatcattccaggagttatccgacacattggaagcccccgtcttcagatcaattgttccttctccaaagtcacgcgcactggagccaccaaccaccataatgactgtatctgcctggctggcaacttcaagggcacgctcgaatccttcttttgaatcacctttgatccggcagcctggtgcataaagaagctgatctgtactgctgtcaccagtcaaagggccaacaggactcttctccgtttgcccatccacatgattagccagcttactgcgaatcccatccagtaccgtcgccactttcgacttcggttgcggagatgtgtaatcgcccagttgattgtaggcctgatccgcatttgggccgatcacggcaatccggcccacatttgctaacgagagaggtaacgtgtcagcctcatttttgagaagtacaaccccttccgcagccaactggcgtgccagttgaatatgcgcttcacttccaattacttctgctgcccgatcggcatccacataaggctgttcgaataagcccagtctgaacttcaacgccagcacgcgagaggtagcctgatccagaacctgcatatcaagcttgccttctgccaccgcctgcaccagatattgcccaaacatctcaccggacatttccatatcgatgcctgcctcaatcgcctgtacggaagcttccattccatctgccgccacatcatgcccacttgccagcatgttgatcgcaccacaatccgtaatgaccagaccgtcaaagccccaatccttacgcaaaacatctcccagcaattccgtattcacggtgcaaggcgtgccatcaatttcgttatatgctggcatgatcgacgcagcgcccgcttccaccgctttgcggaatggatagagatccacttccagtagctcgcgccagcccatatgtacaggccctgcattacgtccgccttctgagctgccataaccaacaaaatgtttcagcgttgccgctactgtatctccacggtcaagactttcaccctgaagcccttctacggaagcaactgccagctctccaatgagaaacggatcttcaccgaaacattcctccgtacgtccccagcgcggatcacgcacaacatccagtaccggagaataggtgaccgcgccaccttgggcacgtgtctctcttgctactgcctggcacatctcccgatacagatccacattccaggtgctccccagtaaaagggggacaggatagaccgttccgtcaatagccatatgaccatgcgagcactcttccccgatcagaatgggaatccccagtctggaatgttctattgcataacgttgaatcagattgaccgcctcagcgccttctctggcggatagtccattttccagcgtaacgcccgtccacggatctgcgcgaagtgcaccatagagggagccgacgcccccattttccacttgctgtttaaaggattcgtttaacgtgatgttcccttgatcattcgtataggtctgccagccaaatggctgcgtaagttgacctaccttttcttccgtagtcatcaggctaagcaggtgttgtacccgttcctctacggatttgctttggtccttataagtcatcaatctgcatctctccaatcctataacgtgatccggttattctttgaccgcgcccaccgtcagaccctgtacgaaataacgctggaagaacggataagcgaatataattggcaacgtagcaagcacaaccatcgccattcgggacgtatcctgcggaatggactgcatggctgccagactcatcgaactgttagcagagttctgctggataaactggatactcgactcaatccgcattaacatggattgcagcggtaccagattcggattgtcgatgtataacagcgcattaaaccaatcattccagtaaccgagtgtactgaacaacccgatggttgccagtcccggcaaggagagtggaaccacgattttcataaaggtatagaactcaccggcgccatcaatcttcgccgattcaatgactgcatccggtacactggtggagtagaatgtacgcaggatcataatatagaaggcattcatcgccagcggcagaataagtgcccataacgtatctttcaacccgagcagctgggatacgaccatataggttggaatcatcccgccgttgaacagcatggtaagaattgcaaagatggagaaaaatctccgatatctgaagctcttgcgggaaaccgcatacgcatacagcgacatgagaatcagactgatgatggtaccaagtaccgtcaccaggatggtaactccatacgcccgcagcagcgtgtccccactctgccagacaaactgatatgccgcgagactccattctgccggaatcagacgatacccatcacgggccagtgctttctcgtctgtaaacgagatgatgactacaaatataaaaggaaatacacagatcagagcgaatagacctgcgatgatgttcatgatcacgttccagccgttggatacgtggtggaagtcgcgttttttaacaagccctgcttgagccatagtggttcactcctttccctgtcctagaataggctgctgtctttatctactttgcgaacaacatagttggagataataacaagcacaaagcccaccacggattgatacaatcccgctgctgtactcatgccgatctcaccactagttttcaaacctcgatatacatacgtatcaataacatttgtcacggaataaagcgtacccgaatcccttggcacctgataaaagagtccaaagtcggcatagaaaatgcggcctacggccagcaaggtcataatcgtgatgatgggcgacagcaacggaatcgtaatattgcgaatctgctgccatttgcttgctccatcaatcatggctgcttcatacagtgatttatcaatccccagtatggaagccagatagacaacgctgctataaccgatggttttccataacgctacgaataccagaatatacggccaatatttcgcctcagagtaccactgaattggttccatcccaaaccagccgataatctgattcaacatcccgcggtccatgctcaagaagctgaatgcgaagtaaccaacgataacccaggatagaaaatacggcagaaacatgccggtttgatacagtttggcgagtcgtttattgactagttccgagagcaggattgccaatgccacagcaaacaccagtcccaggaagataatggcgatgttataaaagagggtgttgcgtgtaatgagccatgcgtcacttgtgctgaacaggaatttgaaattgtcccagccaacccattcactcttcatcagacttgcccagaacccttcacggctgaatcgatattctttgaaagcagccactgtacccacgagtggcaagtaggagaagaagaagaaccagatggcgcctggcagcaccatgagcaacatgactcggtttctaatcaggtttttcaaaaatgtagtcattgtggagatcctccttcaggcttgaatgaaaaaggaccggacgcgataagcagccgcccgatccttacgatgtactgttacttgttttccgctctccaggcatccagctggctttgggcttcagccattactttctccagtccggcttgattgaacttctcaatcacttgatccagattggctgccgggtccagtgtacctgtcatcagtgctgcccaatattgctctttcacgttctgtaccgctgtcagttcggacgatacattgcttgcatcaaagttaaagctgaggatcggggaattgacaccttcagcgttaaacttcttgaactcatcccatttgttatccgggtcattgctgttcagatagagtagcatgttgttcccaagggagtatgaaggcatatcgtagtttttcgattcaggcagattttccatatgcgtgtcatccacttttttgtagtgtgtgccctcaataccggagtccaccatattacgcagcacaggatctgtattgagcaggttcaggaattccatcgctttctccggatattccgagttggccgagatggccataatggagccttgtacagatgtatttgttataattgcttcacttgcaggtgttgaaacgacttgataaccgtaacttgcagaccattgattgtccgcgagcggctgagtctgtgcacgatccaggaaccagttgcccgatgttgtcaggtcgttcgtggaacctgttgttgccgcttctgccgatacataaccagccttgtagtatttgtgcatcgtagtaagtgcttctttcatttcaggtgtttccagtatgtttacaagcttatagtctgttgtatccagcttgattgccattggcagattctgaatgacatagtcataaggcacgtaaggaacatagtttttatccatggcaaatggtgttacactcgcctcgttttccttaattgttttgagcagaggctccagactgtctaacgtacgaacgccagagatgtccaacttgtatttatcaaccagcatttggttaaagcgccatacctcttgttgtggcaactctttgttggctggaattccgtaattgtgtccatctaccttggaaccgctgaggaatgcaggatcaatggtcttggtaagatcctgaccgtattcagtaagcaggtcatccagttcaaggaatgcaccttttctagcattttgtacataatcgaatccaccagaagaagtgaacagaatgtccattggctcaccggatgctacgttaacctgcatcttctgcgggtaatcaccccagtcaaccatcttcatcgttaccgtggcattaattttctctttggtatacttgctgacttcttccatcactttgttgacgtctttctgaggggtaccgatggtataccagatcaactctaccgcgtcatctccagctcccccggattctgaagcgtctttgcttcctccacaggcactaagaacaagtgtaacggccattaacaatgcaagaacgagtgagaagcgttttctttgtttactcatttctttgatcctcccttttcgtgttcccttaggctctacttactaactgctttaaccttatcgaatgaaagcatttacaaaaagaagataaacttaagttttcgaggtacaaattaaagagaaatcgtccttgggcaacttttttgtacctatttaaataaatcgcttacatgaaagagacatgccgggtaacgtatgccatgattttctaccatgccattcctgttcccgatatgtctcttggctctctgtccgcatagttggatctacccgtcaccgaattaaccaaacaccttgaaatcagtcggtgaaattcccacatatttgcggaactgtttatagaaataccctgtctcccaataccccacatttcgggcgatctcatgtaccttcagattggaattgcgtagttgctccttcgcacgttcaatccggtatttgttgatatattcggcaaacgtctccccggtctccttatggaacaattgtcccaaatacaccggatgcaaatgatagtgggcacccagcagcttaagggaaagttcttctgcgtagtgtttgtcgatatgctgaagcacctggtttacaatcggatttttcagatcctgcaatagggattggatcgtctgcgacccaacctgctgaagcgcccgcacaagttcatcaaaagtaccactgtccagtacaagttgaagccctttttggtatacggcagactcatccgagtgtttgatgccctccagttccatcttgaagcgaatcacaacttccagtgcggtattctgtaactccccaggtgtaagcccatcgcgatgctgttcaaaatccatgcgaatccggtcagcaagttgttctgtattgcgggacagaatgagtttggcatactccctccattcaatgaaaaaagtcgccgttgaatttccgcacctttccagcatggcatggtcgatgactttaaggtcgggataaatcatcacatactggagtgcttttttggcctcggcataactggtcggcgcatggtacagtcccttcatcaacctgcctgctccaatgcgtgccgccggatgggttacggtaatctcatcagataatgcctgcaagccatccatcaacttctgttcctcgtcactcgtaccctgaatattggcaataatgacgatgtctccatcgatatcatgaaatacgttcagatggcgtctgtctctaagcatctcttctacacgttcaaacatgccaggtacttgccctttgtcacgcagaatggccacagcaacgtccggtgcatccagcgaaaggttcatgaactgggcacgttcttcaaattcagtagctgcaatctgccccgtaagccatcgatgaagaatgttatctttcagaatctggatgccatacgcatcatcggcttgaggtgataccgtatgatccagcttggacgccgtgttgctcagcgtggattccagttcctctacattaatcggtttgagcagatagttttcgatccccaattgcatgccttccttcagatattcgaactcattgaaaccactgaggataatgaccttaagctcaggttgcactcgccttgcttcccgaatcagatcgagaccattcatgagtggcatggatatatccgtaatcagaatgtccacaggctgagaagagagcgcttgtaacgctgcttgtccattacctgcatgactcacaatttccataccaaatgaagaccaatccacaatatcgtataaaccttcaatgatgaatggctcatcgtccacaataaacaccttgtacatgttacacacctgtcccttctgtatgtggataatgcaccctgattcgtgttccttctccgagggtgctctctatggtgataccgaactctggcccatacaggaagcgcaatcgactatggacactgcgcagcccgaacatctgaccagactcttcaggacgttccagttcttcaaggatttccgtcaggcgtgccggatcaatgcctttgccattatctttgacttccacttgcaccacatcatctgtctcttccacaacaatggataatcggttatccgaacgttctgtctgaatgccgtgtacgacataattctcaatgataggttgaagcgaaagtttgaccacagggtgttgataatatgcagcatcgatctggatagtatatatgaaaatatccttgtagcggattcggaataactccaggtacaaacggcaagcttccatctcatccttcagcgtataatttttcttttgctgtaccaggctcttgaacaatacggatagactatagatcatctcgccgacatctctcgccccctgggatatcgccctcatccgaatcacttcaagcgtattgtagagaaaatgagggttgatgcgcgcctgtaatgcgaccagctcggtctccttctgtttgatctcggccttgtagacccgttcaatatacagattcagctcatccagcatgtcgttgaagctatgtgagatctgccccagttcatcatctcgcggatcgtcgatgcgagccgttaagttgccatatttcactttttgggtgaagcgaataattcgacgggttcgtttggcaaagttaataatgaaaaatgccggaaccagcacggcaaacaaaatacatacgatactgatcgagataatggtattgcgaatgcccgcataggtttcagccatctcttctaccggaacggtgccaatgaccacataaccctgatccgcggagacaaacttgttcacgtacatgttctgctcctttttcattgaatccatatccgtctgatcaaacagggaatcggccacattcacgtaggggtactgcttgccataataatgatcgttggagtcaaataacactgtacctttcgccgataacaccacgatttctcccttcaggttactctcgtagttatccagagcattcccgatcccctccgattcgaaaaacacaagaaactgccccagattacgaagggtctgtgtattgttaatcggtacgcggatggagtagagcgcagggtcccattgattaatctctttgcgaatccagtagttgggtgcactgatattgggcgtttccatcgccatcacgtccggaatataggaatgagctacattggcgtccagcttgcggaactgcttgtgttgattaaaggtagacagatcctgctgttcggcactatacaacatgagttgattaatctgcgaattgcgatccataatattttgaaaatgtttcaatacatcggccgaatagtcatcctgattggcgtaatatccattggtcatgtgctgaacatattcagcgtacgaatgattcatcaggtacgtaatgttggcggacagcgcctcattctgatgcatgtccctcaccatgttttgtaccgattcatactgctgatgaatgtaccggtccacatgttccatcgccgctttctggatcgccagttcccggcgaattgtggagtcggacaccgacaggaagatgatataagacaatgtaatgatcgtgacaatcgatatcatcgagaaaatcaggagcattttcataaacatattatttttgaagaaattattgtaaacgctaacaattttcaattcgcatgttccctccgatgctggtttcctgacttgaattatatcatcaggcttctgacattaacttgtcacctgcaacttttctttagtttatatctgtgtttctttaatttcaccctatttaaaaacgctttcatccactatcgttaaccataagtttagctttgtgtaaaagaataccttacattcattccacttgaaggaggaacagcatgacacgcaaactcaaagcaaaaggcatcattcccaaggtcactgccatggtcctgactacggctctgcttggacaagttgttgcatcatccgtttatgccggagacacgctcccttacacaggcgaaagcgccaaagggatgaatcagccctatcaacacgggtacacctcggcccagattctgaactggacaccagaaagtgatatccatggtgatctccttcgtgcccatgttcccttgcagccccgtaatgaagcgttcgctgccacacaggcttatcctgagcttagtccagatacccagctattcacgatgagcggcgattacggcaatgcattcttcgatagcacaccttataccaatgaattcagccagtacctcttcaattattggcaatatacagactactacagctattggcacggcatggcctctgcgggagtacctgaggagctgtacgatccgagtaaagaatggacggagaaatacttcgagtttggcattttgaacattccgaatccggcctacaccaatgcagcccataaaaatggcgttaagtccattgctaacatctttttctcggacaatgaccgcgggccacaaacctataaacaaatgctgatccaagatgaaaacggtaatttccctgtggccgagaaactggccgagatggcagaatactacaactacgatggatatttcttcaatcaggaagaggttgcccggggtgtagcccctgaggatatcgcttcctacaagaaattcatgaaatatctaagagataaaggcctgtacgttcagtggtatgattccaccatcaatacaacaggtaaaattcaataccagaaccaatttaatggacttaatagcccctttgtgcaggattccgttctcggcagagtctcggattccatcttcctgaactatgtatggaaccacaagatgctccgcgattcccgtgatcatgcccttagtctgggacttgatccactggaaaccgtatttgctggtgtcgaaggtggacatgacaaattcggccgctggaagcaatcctatgacctgcgccataacctggatgagaacggtcaacccatgaacagcatcgcgacattaggtgccgacttcacccacaacgctctggatgaagagatgggcgatggcagcaccaatcatcgtgcggaagatgagtaccagtggatgacctttgtacgcgatcgtgcgtggtggtcagggccaaatcaagacccgacagatgcacgtcgtaatgcgtctgccgatctgtcggatgtgtatgcttccggtgcaaattgggatggaatcgctgcgtatctgaccgaacgctccgttatcaatggctccaattttgcaaccagcttcaatacaggtcatggactgaaatattatgaaaacggcgctgtctcgaacgataaagaatggtccaatatcaacattcaggatatccctgtcacttggcaatggtggatggatagtaaaggtgacaagctcagtgttgattttgactacggtccatcttacgagaaaggcgcaaggtacaactatgactccattggcgcgtttaatggcggcagctctctcgtggtgaacggcacactgaacgcggagaacttcctgcgcctgtacaagaccgacctgtccgtcaacgggcaatcgaaactggaactgacgtataacaaaccgtcgactagtgacgcttcctccctgcatgttggattgatcttcgaagatgatccatccaacgtggtcaacgtaaatgtgcctaatgcaggccagcatacagaaggctggaagacaacttcgctggatttgagtgcctatcaaggcaaaaccattgccgctatgggattatccttcgacccgaacggtaagacaattgagaattaccagatgaatattggcgagatccgcatgttcgacggttcagcggctgtaccggatgcaccgaccggattccatattgccaaggcactgaccaacaccgacgaactggttgttgcatgggacatgaaggactattcagaggtcaaacaatacaatttatatgaaaatggcgcctatgtaggcggcgtgtatgattccactttttatatcaaatcgctaaaacagccatctggtgaactgtctatccgtgcggttggtgcagatggtaccgaaagtgaagcaaccgtcctgccttacgatctgaatgcagccgttcaggatattgatgtgaaattcaaaaagaatggcgatgctattgtaagctggaaaaacccgaagaaagtgaaagactcgggcaaagacaaagataagaatacggataaagacaaagataaaaataaagacaatggaaaaggcaacaagtctattcaactcacactagaaacagaatacacaaaagaacccttcaccaagtcacttcaggtcaaaaaaggaaaacaatctgccgtcctgaccggacttccgaccaacggtgagcattacgtgctgaacatcgccattggcgggcagaacccggtaacccataccggacagctcgcagatcttcagattacaccatacgccaaggaaaaggtcacggtaaaagatggaaagtacacattagccctcccggatctggaggactggtataagatctatgtatatgaaaatggggtaccacgcgagttcggagtcacttacgtttcgcagaaattctcgtatatcattcggggaagaacaaagctgagtgaactgaccttcacgccagcgtccagcaacagctccttgaagctggtcattgaggattatgcgggcaatcaggccagtacgattttgaggtaaaagagatccgcaaggttaaccgaattcgaggcttttaaatttccaggttcctacgttgcgcgaaatgaacctttctagggctgcagtgagagggattccccctcccttcaagtgctaacgaacataccgcaccctaaacggcggattctcaaggaatgcaaattttaacgaactccagtgacgttatttcggtattaaacggcttacagatcctcgagatcgaacaattggacgaaataggacctctgtgattcgttaaatctcagacaagtgcatattggagcgaatagcgtgtcctcgattccttagaccaacatcatttttcaacttatatatagcaaaaaggcgagtctccattaatcgggggactcgcctttttgctatataataaatatttaagaagttcctttttgtttactcgcctgcatctgctgggcaaatctcatcatctcttcgaactcttcctcggatacggcatctccatcggtgcttatgtcttgtacaatcggaatttcgggtttagctttggttcctttgccgtatgtacgggtacgggttccagctgcaccagcagcctgtttgcctttgaccttggcctgatcacgaatatattgaacagctttctcgtaggagttcacctgcttgagcaacatgttggaggcgatcgcctcaacgaagttacggttaatccgctgctctccgccggatacaagcaatgccatcaaataatgaatcaatacattgatgacttcaccaggcaacttgtagctcagatcaattttctcaaatatatcgatcagattgtctggtactgcacccgggaaaaatgtctgcaacagacgtgtgtatggctcattacgcaacatcatattgtattgatgaatatcacacttggtcataaattgcggaggtacttcgacgtaatattccatctgcactccatgctcaacaggtggttcaccggagtcttctttccgctctggctcctccatatgctgtctcagcgccacgaccttggccgcctgtacggtctgttgctcatgacgcttcttcgtctgcctgaactgcatgctcgccttatgctggagatcatccaaaatcagctggccctgcggactgaagatatcatcttcgtccagcagtcggcatacatcctgcacactgaggttgaacttgttcactacataatttacaatgcctagttgttcatgatcgaaccgcagctgttctacatgacggcgattgacggactcccgcgggaaacgcaaaataatgtcggcatagttcaaactattttcttccgctgcatcattcgtgcctgtccgctgggccgtagttgatacttccgacaatgcttgctccaactcataatcaattacgtgggtattcaattcaaatatatcgtaaaagggaacggaaatattctctttattagctgccggataaggcgcgtcgccattttccactgccgagaaaccggaacgcagggaaaggacggcgaatttgcctatcttgtcacgaagcagcagtgtcaaatgctgtgtccggaaaaactctgccggagagagcggcggttgcagctcatattcgtagatgtaatcatcattttccggtatatatagccgtgaagtctgaagtagtcccactgcctcaagcttggatgtctgctctaacaaatatttgcgccctttctcacttggctccaagccaagcgtcatgaacagcctccgttgctgttcaagcggcgaataaccgacctgttcaccgggaagatgctgaaacaacaaccgatacaagccaaccgcaaaagcacctaccatgggctgatatgctcctgttagcatacggtcatccagggcgctaagtccaaactccctgtatacgcagtagcgatgatgttcagtataatggtgcagattcttcatgcgcatagcctgatctccttctccccaaaagtatgtttatctattctatcataaatgtctgatcctcaaatgctcaaaaacaggtaaaaagatggcctgttctcgctccgtttcgtcctaggtcgacatcattcacgttttcgccgtattcagcaaatttcgaaaaaacatgtcgagagtcgctagaatactataagagctctagcagcagaatacaagtgaagatctgaagagaatgttctccagatgtatatgaagtacaagtgtacaataatccttctaatataaatgaatagcaaaaaagccttccctttgtaatcgtaagcgtttacgacaaagacaagactttcacgcgtttacagtggcatgtgttacctctttccaacaatctaaaacattctgtacccacccaaacgcaacttctggatcgtccagccactgattatcgcaccagccagtccagcgatgcccgtcatatagtctacaagctggaaagaacccagatgtgacatcagagatgacgactgatcccatagagagtacacaacaataggcagaattacaataatgaacagataggaaggaaaccaggttgtcttcatcagcatgttcagaatgaaaccgataccaaacatcataacgaagaataataccatcaataccaacacaggtataaattgcatcgggcgacattcacctcttctttcacacattcaggtttcacttctggatagtagttagtgtaccgcaaaaaatgtggcgaagcaacgaactttctggacaaatttccctatatttatactctgttcatttgcccttctgcttcatgttgggatacaatgtaaacgataaagcactcacccgtcccttataggggatttggaaatataccttgcaggaggaacacaaccaatgaacgaagccgcatcaacactggagggctggtatgccctgcatgattttcgctcgattaactgggccgcctggaaagcagcagatgatgaggaacgtgctgtagcactggacgagctggaagaattctggaaggaatggaaagaagtcgagaattcatcccaaggaagcacggtcgtttataccgtagtgggacagaaggctgacctttgcatgatgcatctgcgtgaaacgctggaagatctgaaggccgttgagaacgcgtttaacaaaacgatgtttgctcagtacacgaccaaatcttattcttacgtcagtgtagtggaactgagtaactaccttggcaaagaaggcgaagacccgatgcaaaatccggatattatcgcccgtctgaaacctgttctgccacaacgacaatacatctgcttctatccaatgaacaaaaaacgtgagctgaatgacaactggtacatgctgtctatggacgagcgtcgcaccatgatgcgtagtcacggcatgattggccgcagctatgcgggtaaagtaaaacagattattaccggctccgtcggtttcgacgattgggaatggggcgttacgctatttgcggatgacgcacttcagttcaaaaaactcgtctatgagatgcgtttcgatgaagttagtgcccgttatggcgaattcggttcgttctatgtgggaagtctgttgaacgaaggaacactggaagacatgcttaagctgtagaaacagcacaaagcacaataaagcaccgcgacatctcctgtaaaggatattgtcagcggtgctttattatctatctatattctactacctcaagcttgatttagatctatattgtttgaactatttatttacacaaaaacggaaaggacagaaaaaacctgaaaaagcgaagctacaagctttctgcaagaaagctacttcgaaagcatccacttcgcctaaaagctttctgaaagaaagctgcatcggaagcatacgctatcaccggattttccctttaacaaaagggaatcaaaaaaatctggggataacagcgattggaaggttattctgtcattgaagtgtatgtgtaaacatctttagttcaacttatatcgtctctaatcctcgtcctcatcacctaccgctttcagcgattcgaggaattcggctgtggcccgatcacggtcacgacccttctctttaagccgctcaatcgcaggcataatgagaatatccacttctttctgcacgatgtaggccagatcatactgatcctgttcctcgagataaccaccgacctgcatcagggcgttgtaacgatccagctcttcacgtgttaatagtccccggacctgaacactgcaatgtctcatccaaaaaaccgccctttcttcaggactagcggaataccaccaatgatgaacagataacgcagatcaacaagtttcttcaactgagccgctttccagcccttgtatttcttgccgcctacaacagcaatagcttcacctttacccagtgatgcaaccgtgcctttgctcgtaaatacaaaaggttgtggctgtttcttgcgaatggatgccacaacgttcttggcgcagttcacaccctgctgcatcgcaatctgggctgttggcggataaggccgtccttcagcattgaacacaagtgaattatcaccgatgacatagacatgctcatgccctggagcacgcaagtagtcgtctactttcacacgtcctcgcatcacttcaagacctgcctgttcaagcagtgagttaccgcgaataccgccggtccatacgactgtagctgcatcgagcttttcaccttcacccacaataaccccgtccgggagacattgcttgattggaacaccaattttgaaagtaacaccctttttcttgagcacattcattgcatgttctaccaattccgggtcaaatccaggcaaggccgaaggcgctgcctctacattatagatgtgcacatgtttcggattcacgtcgaactccttgcacagctgtggaatacgatctgcaagttcagctacgaattcaacaccactgaaacccgctccacctacgacaaaccgaatacgatttcgtttgttatcgtttttgtacatcgcaaattgatattcgatgtgttctcgaatcagtctgaccgagttaatgctgcggattgtcatggcgtgatcgagcatccctggaataccgaaagtctcaggctcaccgcctagtccaataatcagataatcataggataacgtgccgtcctccagaataatcttccgatcctgcagacgaatctccttcacggaagacttgaccagatcaatcttgaactcatcaatcagcttggaaatgggcactcttgcatgctcaatggtatccgtgccggctgccggcatatgtagatgtgtagtaatataatgataatcatgccgattcaccagtgtgacgtcggcctcgttatagttcaattccttctgcagccgctgggctgtcagaatcccgccatagcccgcgccgaggatgacgattttgggaatactgctcatgtctataccccttccggtttcacttgcatcagcccgatcttgggtgagatgcaaaatgcacatacttacaaatattgatgaggtcttgcccattatgacgacaaatgttaacttcgcgaatttatttaaacgtttgcatcaatttcataactcactaaaaatggattttatgaaactagatatcgacgtatcgaaccgttttgatctatatctagacttgattgaagcaactaaagggtttatgaaattgatacgtttgcacgcaagttatcgtttcaagttgtgaaattaaccacaagattctacaaaacacgggatctgtcttcatattacatattgactctaaattagacaaaaaaacacatagtacaggtcaaggatatctgtatttctagtaaagatcaaggttttttttgttatttttcataacctttcatttccaatttcatcctattctcatctgatcttcatcaattgttcccagtttcgtgacgccgctaactttgcaaccctgaatacaccgtttataataggaaagacagttcagcacccatgccggttacgatccgtagcctgcacattctttctgttaactacctattaaaatatgaaaggtgttgttgattcttgactgcacaaaattccagtcatgagatgactgatttacttattatcggtggaggtcctgcgggtctgttcgccgcgttttatggtgggatgcgtcaggcatccgttacactggttgaaagtatgccacagcttggcggacaacttgccgctctttacccggagaaatacatctatgatgtagccggattcccgaaagtaacagctcaggaactggtgaataacctcgttgagcaaatgaatcattttaacccgaacatccgccttgaagaaaaggttgtatcggtggagaaaaaggatgagcaacatttcgtcgtgaagacggatgagaatgaatatcatgccaaagccgtcattattacagctggtgtaggtgcattcgaaccacgtcgcctggagcttgaaggtgctgccaagttcgagaagagtaacctgcactacttcatcagtgatctgaatgccttcgctggcaaaaaagtactgatcagtggcggcggtgactccgcggtagactgggcactcatgctggagcctatcgctgagcaagtgacgctgatccatcgccgggacaagttccgtgcgcatgagcatagtgtcgaaaacctgatgaattccaaggtgaatgtggttacaccgaccgaaatcacggaacttcatggggatgacacgattaccaaagtaaccctttcccatgtgaaaaccaaagaaactcaggaaatcgaagtagatgacgtgatcgttaacttcggatttgtctcttctctcggaccgattgccgagtggggtatcgaaattgacagtaactccatcgttgttgattcccgcatggaaacatctattccaggaatttttgctgccggagatatcacaacatatccgggtaaactgaagctgatcgctgtcggattcggcgaagctccaacagccgtcaacaatgcgaaggtatacttcgatccggatgccaagttgtccccaggacacagcagtaacatgaaacgctagttttgctgaaataacatatattggtacaaaaaagggtatcttactcctgagtgaatccatatcaggagggatacccttgtcttatatatgcccgctgtgtaacggtctggttgtaccggagcaggcttgcccccactgccttcagggactgttagaatgcggcaaattggatgattacaccggaccatacagcccctacgtattccaaccttcctctgacacggcagacgaagtcgaaaacgtttgcaatcatgtgatgtactgtcaccattgtcagacgagcacgccatggccagtctcactatgggacttgtccggaaacctgtaacattgcctgcaatgaggatctctagtgaagaatggcagatacgtcggtacccagtttgcgcttatggatttctgccaacagcagtgcgatgaaatctcgttcgagattcaactcaatcgctttatggtaggaatccaacaacatctcatcggataacatagccatttcccgccacaacctttccttttttttcctcaaaactatcatatcagagattcatatagagaacaagcgttcttgttatccacaacgatatgtggaaatcctgtgcatagtttgttgataaatggaaaaaatatagagtaatcaacgtgtatagtgtggacaatatttatgcacagggagtttgtactactgtcagaacgtttatcagcgtattttttttggaataaattcatagtttcaagacttgttgcgagtaaattacccggtaatgtaaaatttcaaacggttttcataccgttttcttttatatattatcggtttttcttgaattttcttgagttttcccattcattttctattggggtctggtattcacttccagaatccagatcttgcctgaataatccagtccataatcaaatccaagctgacctacaccagggaactgactttccataatgtacgtacatgtcattgtaagggaacgcatctcccggcgtttgtgccgaccggatatatgtggcagggataaaccaagagctcgccttccggataacatggtgccacccttgctcagattcgtcacacagagtccgggacgagcgagtcgtcctactaaggaacggaatacccagcctcgttgggttttgacaactttgactctgtaatcaacaggtctcccttgaattgttgccagatgaatgccttgctggatcaagtacttgcgtctagcctttacacgcaccagagagcgatacatctggctgaaactggcgaaagaacgggtcgttttcatatgggtgtatcgataagccccaccgctggccgatacccggataacaccgtaacctccgcctcctacaataggtttgacatacaccattccataacgactgagcatttgcagcagattacccgagttgaatgccttggtctgtgggatatggacagcagctaccggatatttcatcagagccgctgtcttccgccatttgcttgcaagttgtctcgacatgggttgatctccttccttgaaacaatagtccttccttatacatactcaacagaagccttgctttcttggatgtctgtccacggcaaaggccccttttccatgtaacctgtcccagggtgatggcggaaacgggaacacgcgcccggtttacttttcaaacaagtcaatctgtcgtatgctactaaggaatggcttggaagggcttaaatatgaggatctaaggagcgttaagaacaaatggaagcttttttcaaatcactttatggcgtagcctattttgcaatgtcgatcgttctggtagctgttacggtacttctctttgtcacaggtattcgactgtttatgcaaaagcgtaatcgcggctttgccgtgagttgtcttatatttgcctgtttcatcgtctttatcattgttgttatgttaactacgcccttctctgccacaccgccgggttcaccggaagccatggctgcccttcttcactttgggtagttgaactctgtagaaggagatgcttatgacacgtactaatgaaaccttaggaattattgatatcggctcaaactccattcgtctagttatatatgaactggatcaggacgaagcctatcgcatcattcatgaagacaaatacgccgctcgtctgagcagcgttgttgagtccgatggaaccattctgcgccattctctggataaagccatcaccatcttgagtcaattcaaagcgacctgtgaagcgtatcagaccaaactgattcgcgcagcagctaccgcagctattcgtaatgcaagcaatgtcctggagattattgaatggctggagaccgagacggggcttaccattgaatgtgtatcgggagatcgggaggcctattatgggttccttggtgtcactcaatccattgatctggcagacggttacgtcgtggatattggaggcggcagcacagagatcacggtctttcgggatcggaaaaggttacatagcatctccctccctattggtgcagtgaattcacatgcccgttacgggggcgaagatcagtggaccgaggaaaatgcaaatgcattatgcaacgaagtcactgaggctctccgcggacaggattggattcgtgagcatcctggtctgccactcatcggacttggcggcacaatgcgtacactcgccaaagtggaacagaagcgtacccagtattctttgcctgtcagccatcattatgagatcagtgaggaagcgatggagaacatcgctcgctccttaccacatctcacctcggcacagcgcaaaaaggtacctgggctcgccaaagatcgcgctgacatcattgtgcccggcgtactgatcctacgaactgtcttccagataatacagggagatcgttatgtggttagtggcgcgggtctacgagacgggttgttgcgtgattacatggctggagggcagccggtcgttccagacgcgctgaaggacagtatccgcaactttatccattttggtccacctattccagagaaacgtctgcaacggattcatcaggatatggttaccctgtatacagcattacaaggtacccctcctgatcaagcagatgcccgaatcctgtatgcatcctccatgttgcacatggcaggtaaacagattaactatttccgttatacacagcactcggcctattggatcatgaattcaagcatttatggactttctcatcgggagaccattctaagtgccagtgcagctgattatcatcccaaaaaaagaacgccccaactgctgaataagcaccgggacattctgaaaaactcggatgagcggcatgctcatcgtttaggctctctgctgcgcgtagctgaagccatcaatcgatccgagagcatcgctgcgatcaaagcaacaaaagaaaacgactcgctgcaggtgcaattcacctgtacagctgagccgttactggaacttgatggcctggaagaggccgtcaaggatctgaaggaagcctggggagttacgttaacgcactccattcagcaggcttccaagggataatacccatggcctccgtctgacttctcagcgggggcttttcattttctacaaatacataattgccaccaggcataagttgtctcgctttgacattatccataagggacagattaagaatatcgaccagcatctttttcagctctggatcaaatacgggacacatgagttcaattcttcgattcagattacgtgtcatccagtctgcactggagatgaatacatccgggttgccgctattttcaaaataaaacaaccgtgaatgctccagaaaacgatccacaatgctaatgacccgaatattctcactgagcccctctacccccggacgcagacaacataccccacgtacaatcagatcgatctgcacgccggcttgagaagcctcgtacaattcatcaatcatttcctgatgggataaggagttgatcttggcaatgattctggaaggtttgcctttcagcgcgtgctctgtttctctacgaatcagtgtaaacaactcatccttcataccatccggagctacacggaacgcctgcaatgccttcggaccggagtatccggtaatctcattgaacaattcggatgcatcttccccaataattggattagaggtgaacagtcccacgtccgtatacaccttggctgtactctcattatagttaccggttcctacatgaacataacgtctcagcccctgctgttccctgcgtacaacaagaatgattttggcatgggtcttcagtccaaccagtccatataccacgtgacaaccggctttctccagcttacgcgcccaagcaatgttgcgctcttcatcaaaccgggctttcagttccaccaccaccgtgacctgcttaccactctcagcggcaagtgcaagtgccggaataaggcgtgaatcgccattgacccgatataaggtcatcttgatggccagaacccttggatcttctgaagcctccaatataaaatcagtgactggttcaaacgattcgtaaggatgatgcaccagtacatcgcgtttgcgtagcagctcaaaatgactttctcttggcagaaactcaagtgggtagactggcttcaccggactgtatttcagatgtgagaaactttccagactgtctacgaatcccgccagaaaactcagatcaagtggtccatcaatttcatataccgggtcctgaatatcaaattcatcctgcaattccaataaggcatccggacgaaaatccttgcacacttccagtcgtacaggagccccgcggcgtctgcggcgcaattctttttcaatagcctcaagcagatcttccgcttcttcttcattaatgaacagatccgcattacgggtcactcggaattcctgtgcagcaagcgagatatatccgctgaagagcgtatggatatgatgtttgataagatcttcaatcagtatgaatgttttctttttgctattcgcccgaatgggagcctgaactacccgcggcagattggaaggtacctgaacaatagccataaacggctctccctcttgctccccttccttctgtaacatcacggacagatagacagacttgttgtgtaccagtgggaacggacgactctggtcaatcgccatcggtgtgagtaccggaaaaataatttcatgaaagtactggtccattgcgcgctgctgtgtcacattaagatctgtatattcctgaatgttcacgcctttcttggcgagtagacgaatgagttcacgatacgttttatactgttcggcgaccatggtcccggttcgtttgatcaatctgcggtacaatcccgatggcgtgtatcctgtaaaatctttttgcgtgaatccggccttgatcttctcttttgtctccgccacccttacactgacgaactcgtccagattactagcgacaatgccgagaaatctcatgcgttccagcagaggcgttgttggatcctgggcctcctgaagtacgcgccgattaaattcaacccaactcaaatcacgattaacgtagttgcctgttttgacgtctctatgcatgcatggcctccgaatgtgttgcatatctattcttggttataagttctcatataattgtactattcgtaatcaacatcaagcgtcagcgcagtgtaaacgctacgtaaaatttatgtaaatgatacctcatggccgcaactttttccatccctttacaaaggtcaatagacagagtaaagtgaagtacagtgtgatttggtccggttgcttgttctcattccaaatatagttgatcaaaggagtatataatgaaatccaacaaacctagaacattacaaaaaaatatagagtttttcacggctgcactatcccaatgtatggtaagcgcatggcaggaagacccggctggcgtctattgcgaggtcggttgtggcattgtggagcggatcagtgaagacagcgtgcgcatccgaaacaatgacggaacaaagagccattatgcacgagatatcacaatgttccagaccgaaaaataattttgcttaaatacgtaaaaaagactagctttcccaaacaaggtgttgtatactcttgccacaaggaaaggaggtgcgtcaacatttctaatgtcatgttgaacgtgtcccttacccgatccactagctcaaattaaaagagtctggtggaggcgcgggatacggatcaatgtttcaaaaagcgccacgggtagaaaagccgtcttcggacggctttttgttttctctttttctgtagagaggttgagaaaacacccaaaatattggaaatggaccctttagtagagtaaaccaggatggctataattaggatgcaactcaacctaaatccgaggaggcatcttgtaatgttcaaaaatgtaaggggtttcaagacatccatcatgttggcttttgttttgttattcacctccatcatgttgcccgcaggtcaacatgccagcgcagcaccaagtttcgccaaaggagccgacatcagttgggttcccggaatggaagcccaaggttacaaatggaaagataaaaacggcgtacagcgcgacatcattgatattttgaaaaaagactatcaaatcaattccgttcgcattcgggtattcgttaatccttcgaatgattatgggaacggttacatgaataaggatcgtgcggctgcactcgcacaacgtgccaagaatgctggcatgagtgtaatgcttaccctgcactatagcgattcatgggcagaccctggtcaacaaaccaaaccagctgcctggaaaaactacacgtttcaacagctcatggatgcggtgtggaaccacacacgtgatgtcatgacggcgatgcaaagcaaaggcgttacccctgactgggtacagatcggtaatgaaacaagcaacggcatgttatgggaagatggtaaagcatctaccaacatgaaaaactatgcgtggttggtgaacactggccataacgcagtaaaatccctgagcagcggcaccaaaaccattgtgcatctggcaggtggagatgataacgccctctatgtatggaatattggtggtctgatcaataacggagctaactttgacatgattgccatgtccctctatccttcagcttccggctggaacactgctgtgacaaatacagtaaacaacgccaaggatatgatcaaccgttatggcaaagagatcatcatctccgaaattggcatggacaataaccaggctgcagctggaaaaagttttgttgctgcgatgaaaaaccaaatccgcaatctgccaaatggcaaaggtaaaggtgtattctactgggagcctcaggctacaccaggttataacagtggatatggtaagggcgcttggcagtcgaatatgatgccgactgttgtcatggaaggatttattgactaagtacggtgggtagaagtgtgggctttgggggcagcgtggtgggtgttccggtggcggatcgttcttatgatcgctgttatccccagatttttatgaattcccctgataaggggaaaatccggggataaaggcgaccgctccgcttcttcagaatcgattccgccccctccactacgttgctgctccttgagacacttctaaaaccgtgtgtaggcaatggtaagtagtaaggtaaaacaagagcttgaggcgctgttcccggggggattagcgccttttggcgatgaagtgcgttgagggggcagcgtgctggacgtttcgggatcggatcgggcactcctaaagcgtgtcgcaatcaatcgaggaggggtgcatcgctcgggctggagactgatgttcttttggcttacatatgaatataataagtttattgagataacacataggatcaacttctaattggagaggagacataaggatgagttttttaaaaatgttcggtcagttagctggggaagttaccgggaaagtgttgggcggtagcgtgagggttgttggcgaaattgcaggaagcccctttatcaaagaagtcggaaacggcgtagagaaagccacgattaatacaggcaaaaccgttggacaactcgctagcggtacatatgatcttgccagtggtgcaattcgaaaagatgataccgccatagacgcggggcttgccgatattggaggtgctgtaaccaatactgcaaaaggtgtagcgatatcagccaagtatgtatataacagcggtaaagatgttgttgtgggcatgaaagaggaagataaggacagagtgaagcttggtgccaagaatcttttagctactgctgcggtaacaacactcgctgtcggtatcatcgatgcagttgatggggctgaaggtgtggatacgtcggaatccggattagatcaccaataacacaacaactgaagaaaaacagcttattagggcaaccaaaatatggagacaactaaatgatattttttcaagaaaaatccgttgtttcttctgaataaaacatgagtagatgaacaccgttatcacaacgggcagatataaatgaagatccggaccatccgtgctcggtaatagtttattaatatatctacctatcgtctcgttgaccatcatgaacccatatatactaccgattattgctgaaactgcaaactgaaatagtatctgaactacagcattctttacaaagaatggatcacgtttgcggtaacggttattaaccatcatatatctgttgcctcctcgttttttgattactctttttggttactatttttgattactactcctgtattttaccataacgttgatcagccttcctttttagtttttatcgacctatcgctcccccacaaacaaaaaattgccctctccacctcattggcagaaagggcatttataacgattaagatacctctgttcagcttaccttagcgagtctcgtagcacgtatcgatgcggcagcgtatacgataagcgctgtccagatgagtgcgaaaccaacgagcagaactggcgagaccgtttccttgaacacaaacacactcaggatcagcatgattgttggcccaatatactgtacaaagccgagtgtggacaacgacattcgagcagccgcccgtgcaaagaacagcagtggcagcgccgtcaccacgccggaaagcaacagttcgaagaacatcggtgcaggcagcgtccatgccgttgcttttcccacaatggccaagtagatccagtagccgagtgcgatgggaagaactacagctgtctccgaaaataagcccacagaagcatcttgcttaatcttcttcttcgccagaccgtacaagccaaatgacacggccagcgagatcgcaacccatgggaaacgcccgtagtcgatagcgatgataagcaccgcgacaccagcgatggcaatcgcgagccattgtccacggtttggcttttcatgaaggaagacaaccgccagcagcacattcagtaacgggttcaaataatagcccagacttgtctcaacgacatgaccgttattaaccgcccaaatgaagatcagccaattaatagcaattagcagcccactcgcggtaagggacagcagggtcgaacgactggtcagaatgcgcttcatgtcactccaacgacgttggacggcaacgaaaatccccataaagacaaatgaccagacaacccggtgcgataaaatctcacctgccggtacattttcaaacaacttccaatacagcgggagaactccccacatgatatacgcaatgatcgcgttgattaatccactattcataactgtatcccctcttattgctctgatatctcaacggattatacgcctcgatcctcatttaagtaaagggggtaataggtcatacaggaatccatgcctagttcaaatgactttttgtttgagcaaaagcttcacgtttagcgctaccaaattatgctttgcgctttttctttcttactctcatgaagaagataaagatcgccgcaaatacgactacacctacgataaacaaatccatatcttgctcaaacataaaccacattttgtgttctacgttcacttgttgttttggtggatatccttccccaaatagctcagttgcttggttcaaatcattcatttcgatggtcaaactgcacggactactacttaattcgccatccacttcgctaaagtatattaagtatttgttaccttccttgaaatcaaatccccatgtgaaattagttgcaataattagttgagagtcaacttcagtattccaactcctctcaacttccactaaaatatatctaattttctctttggtccccgtaaatccctcttgcttcaagtcgacctttacttgctttacttcaccataaacagctccatcatatatttctaactgttcttgggggcttcccgattcaacacatgacaaagcgttaacatcttgtgcatttgagataaagaacacgctagatataaaaaaaattaacgtgattatacgaagcttcagtttttccaccttcttctcataatgttaattggtacatctttattgacctgtttaacaggaaaaatgttacatttttcctgacctttaggaacaaaattcagtccatctttaactccagtaatttcaaattccattccgtcgacctgttcatatcctgtagtaggaagccgttcagaaaagaatcgtctatgtatggtagcgtcacatttgatcctattttggttactttcactttcctccaacatgaaacacaccaattacggtttcaccatctttgtcatacagtggaatatcccatccgtctggtgatctgctgttctgtatcgcaatagcttcttcaggtgtttttggttgctcgccatccatgtcttttttcagcagatatccgtctgtaccatccacaccagtagccaagattaaatcaggttccgtttctggagaagtcgcatatgcggcagaaccatatgtctgtccattcttatttttcggataaagagaagtaatgtgaaattgattcatcttatttttaacgtttgtatattgggataaccctgaaccactcgattcattcatcataaaaaccaaaaagatcaatagtataactccattagaatacatcttcacaactgttcactcccttgtacttttgaactcgcagcaattccaatgaagagaagatggctttcacacaatcagactttcctcccaactttagaataatataacatagattcaaaggagtagttggaagttgaacgatactcatctaacctatctaacgttattgcagaacttccctcttcgataacataaaaaaacggacaccgatctgtggagatcagcgtccgtttgtatgttccatattatcatttaaaagtgttacttcacttcgccaacaacggtaaagcgctcgtttttgtgttgtgggttctcaatctcatcaaccaaagcaatcgcatagtctgcatagctgatgtagctgttgccttcgctattcacgagaataacgtcgttgcctgcttgatatttgccggtgcgtacaccttctggattaaagaatccagccgggctcaggaatgtccattgaatacctgaagatgcttgcagatcctgcaagttttggccttggttcgttgcagttgctttgtaagcatccgggaatcccggggattcaaagacacgcaatgttttggactcatctgtgaacaggcttcctgctccacccaccacgatcagacgagtgtttggtgcatccttgaggatgttgatcaacgcttgtcctacttccacatgcaggttttctttaccagctggagcaccaaatgcatttacaaccacatcgaatgctttaagatcttcagctgtaagatcaaatacatctttctccagcgtattcaggcttttatcttccaatttggatgcattacgaacgattgccgttactttatgccctctgtctgctgcttctttcaaaattacacttcctgctttgcctgttgcaccaatgattgcaatgttcatcatgatctctcctttaaattatcgatattgtttatgtttgaactttatattgtaactatagttgttacaactaagtttgtcaaccatgcacaatcagtacacgcaaaaaagcccctgatatcatgcccgtgcaaaacggatacaattcagaggctatctattaaagggactacatactgcttatttaaaacaagattgggaaaccgctgtacaactcagtttcttaacaatccttatcaggcacacccgcatcttccttcgtacggaaagaagatccacatccacaagtggctaccgcgttcggattatggatggtgaacccacccgtcataccggactcttcaaaatcaatttcgagaccatccagatacttcaggttttccttctcaactacaaccttcatactctgaatatccatatacaggtcctcatcggactctttatcgtcaaagcccatggcgtacgaaaatccggtgcaaccgcccggtgctacgccaagacgcaggaacataccaggtgtttcttgctgtgcaagcatctctttcaatctgtcagcagccgtttcgctgatgttaatcatgccaggtcactctcctttttcatataaaatcatgttcaaaaagggcgcttttcagtaccaagaagatgggatgaagatagaaatggagtagcggagcgtaggcaaaactacgtgagcaacggacatttcggctgaatcccatattcgacgctgagatgccgctaggcatccttcgtaatcaaaagcggactttttgaactacctttcattaactcttctttaaattatactccaccccgtcaagggtctcaagtcatgtttgcctctttccgcgttccccctgaactcctttttcttcccagtgtattgaacccccgcgacacgaggtttataatgaataggtggtcgcactgaaatgtcgatattttgccatgacttattcaggtgacgatcatatatagagttgtaatttttttcacatttcgagactgtccgcagtccccaatgcatatagagtcacaagactcactttaatgaaaaaattagctttacgtacgcagcacacgctgcaccgggtaaataagagttagtccatataagaaggcggcagttgaccgcatctttgctatgtagttctgtatacagatcctacacacaactcaaatccggttaagaacaggaggaaacagtatgtctacattggtaacaccgttcacagacaaaagaatggctgaaatcgttgagaaagtgcagaacggcgtaaggctgaacgtagaagacggcgtatatctgtatgaaacagatgatctgctaactttgggccagctggccaatgaggccaacttgcggaaaaatggcaagaaagtatatttcatcgaaaacatgagtctttattttacaaacgtatgtgaagctcactgcgctttttgtaatttccgtaaagaccagggtgaagaaggctcctatacattatccggtcaggaaatgatcgattatgtggaacagcatattcatccaggcgtacgtgagttccatatcgtaggcggacataacaaccatgttccttttcagtattatgtcgattccctgcgtgctttaaacgagaaatatccggatgttacgctgaaagcctacacggcagccgagatcgatttcttcactcgcatcagcggactcagtattaaggaagttctgcaggagctgcaaaaagcaggtctgaaaacattgactggtggcggcgctgagattctgtcggatgaatatcgcaaaaaaatgcgtgtagacaaagcgaacgtggatcgttatcttgaggtgcaccgtactgctcataacctgggcatgcgtacccatacaacgatgctgtatggatcgattgaatcctatgaagaccgcgttaaccacatggtgcagatccgtgaattacaagacgagaccaacggattcatggtctttatcccgctttccatgcagccaaaaagtaaaaacgcgagcattatgcgtcgtaactcggcttatgaggatctcaaaacaattgcgatcagccgtctgatgctggataacatcgatcatatcaaagcatacttcattaacatcggtccacagctagctcaagttgcccttggattcggtgcttcggatgcacacggtacaatcgttcgcgaacggattagtcatgcggcaggtgcactcacacctgaaggccttacacgtaaagagctcatatggctcattaaaggtgcaggacgtattccggtagaacgtgatacgttctacaatgaaattcaagtgtacgaataggatatacctccatccacaaccaatattgcaccagcaccactccagaaagcagctttcattatagggagacgtttgaattcgagtggtgcaaactgctgattaatatcttcaattttcaatatctacttttcaattattcaaatcataacaaaaggagcagctatgttattgcatagctgctccacagtttacagccccatttcagtgggactgatgcagaaaggaagccgagtcatgaaaaatttcgtcattcttggaggcggttatggcggcctcaccatcatcaaggaacttctggagggtaaaattccatccgatacacaaattattttggtggaccgcagcccctttcagggattaaagacagaatattacgcactcgcagcaggaaccgtatctgattatgacctgcgtatccaatttccagtgagcgataaagtcacttaccgttatggagaagttacttcgattgacctggaacagcgtcagattgaatttgaaggccaagacccgctcgtgtacgacaaacttgtcattggacttggttgtacagaccgtttccacaacacaccaggcgccgaagactacagctgtaccattcagagctttagcaaaacacgcgagacctacctgcgccttaatgaagtcaaagcctatggcaatgtgcatatcgtaggtggcggattaagtggtgtcgagatggcagccgaacttcgtgagagcagaccggatctgaacatcagcattttggatcgtggtgaacgtgtattatccgctttcccgcaacgtctatccgtgtatgtgcatgaatggttcaacgaacatcaggtagagacacgcgggcatatcgccatttcacgtgttgaacctaacgccatctataaccgggatgaacagattctaacagatgctgtcgtgtggactgcaggcattcaaccagtaaaagtggtacaggatctggacgtaaccaaagaccctcaaggacgtgtcgtcctgaatgaatactaccaaatcccggaatataccgatgtgtatgtcgttggtgactgtgccagtgtcccttatgcacctagcggtcaagctgcggaagtacagggtgagcagatcgcccatattcagcatgccctctggaaaggcgaaaagcccaatccacatccactcaagcttcgtggcacactgggtgcactcggcaagaagtctgggtttgggctgatgggcaaaacgtccatgatgggacgtgtacctcgtattttgaaaagtggtgtgctctggatgtccaagcgccatctcggttagtcgagatcgagctcgtcccagacatcggcttcggcaattttggccagaatggcgttatatagatcttccactttgtccgtgatgacaacttcaccattcaccagtgcaaaaggagtcatagaacattggccgcagttggtgaggcagccgtattcaatcacgtcatagtctggattttcttccagttgatccatgacttcatctgtgccaaaatgcatattattggcacaaaattcaataatcggtctcatataggttcacctgctttgtttgaccattttaatttgtggccatttgtaatataatataggggaaaggagttgaaaaaaatgagcgaaaacgcacaaagcaccatgtatgatgaagtaattgatgtgcttgacaaacttcgtccgtttctgcaacgcgatggcggtgacgtggaactggtcgacgtggaagacggcattattaagctgaaactggtcggtgcctgcggcagttgcccaagctccaccattaccttaaaagccgggattgaacgtgcccttctcgaagaagttgagggtgtacaagaagtcgtacaagtattctaatcaatccttcacgaaataaacctcaagagcctttcgcttcgcatgaagcggagggctctttttttgtgtgcatatgcagagagtccatgttcacagtcaccttgacccgtttccacgtacaatccttcaattcaccttttaagtatcctcgcgctgtatggtcggacgaatcggatcaagtcctccagatacatccataatgttgcctgttataaaatcggaatgatcaagacacagatacgtaatcactcgtgcaatatcttcaccgctgcctgggcgccctcttggcgtttcctcgtcggtgatgcctgccatttcatcaatcgttttctctttgttcgcaccacgaatgtcacctggacataccatgttaaccgtaattccatacggggcttcttcaaccgcgagtgtctttgtgaacgaaaccagacccaccttggcagccgcatatacggcgcgatgaggccaagatctcgcttctccagcatgactgaagccaaaatggataatgcgtccccattgcttgcgtctcatctctggcaatacacgctgatccagtaacatcggtcccaacagatttccctgcacaagcatctggacctcagcttcagaataatccgcaaataatcgtcgttcacggacaaatggacctgcgttattcaccaaaatatcaatgttgcccagcttaccttccacctgctcaaccaatgaagagatatcttccaccttggatatatcagcctggatggcaatgcaccgcacacccttggctataatctgagcctttaaagcctcagcttctgttctgctgtgtacatagttgagggcaatatgacacccttgatctgccagactgagggccgtcattttaccaagacctttggcacttcccgttatgagggcaatctttcccttcacgttcatccccctcttcaaagagcagtcactatccagtataaaagatttatcgtcctcctacaactcgcttatccacaagggattattcacctttaattccaaatatatcttgattgaaattaaacacctatggtactgtcgaggatataacctgaaaggacctctacacgaatatgaagaacaaaagatggatattatttcttacacttttaatgttgagtttattcacagtctctagtgccttacaggtatcagcggcaagtgagaatgagccagcacctgatgagtacgattggattactggaccaggatctgtctctttggacggtaaggccaccctggaagtccctgaaagccattcctatctggataagcccaatacccaacgctcgatacttaacagtgatgggaagcctaacgggaatgaaatcggaagcctaaccagcaatagcgaattcggctcgtggtatgtagtgttcgaatacgtaaagacaggtcacatccacgatgacgatcaaaatttgaatgccgaagatctgttaagcagttatatccgaggcacagaagaagataacagagaacttgatcctgaatatagaacgtacataacggggtgggaaatcgaaccggcatatgacagtaccaaacatcagttggtttactcccttggtttcaagaatgctgatcagcaagccatggtcaattacaatgtaaaactcctgacacgcgaagggtacatcacagccattctggttacagatacggccaactttcaacagagccgtcaggcattcgaggaaaccgtacttcataagcttagcatcaatgcaggatacacctatgaggagtacaatgcttcgactgacaaaacatccactatagggctcaacagtcttctgatgggcgggatcgggtacacagcttcccagaaattcagtgctcttcttttgctcaaaaaaggatgggctttgatcctcgttgtcgtccttgggttaatcggttggatcagatacaagatcaaaagctcacacggagaagaagaaacactctctccctccgagagaacgtacctgcaagaagcagatgagcagcagtatgctgatcagaatgaattatcctactaccgccaatctgggcatccatccaacgcggagaaacaagataagccctaacccatccttttttgatccccacgtcagcacagattaggaaacataaaataagccgtatatctcttctgaagagatatacggcttattcttaatagcttcacatcatatcatacatatcgtgaattattcagttgcaggttcaactgcacctttataacgttctttgatgaatgttttcacttcttcggagtgcaaagcagcagccagtttttggattgcatctgcatccttgttgtcctcacgggaaacgaggatgtttgcgtatgggttaccttgcagatcttcgatcagcaaagcatcattcgccggattcaagttcgcttcgagcgcatagttagcgttgatgaataccagatccgcttcatccaattgacgaggcatcatggctgcatccagttcaatgatatccaggttcttcggattggctgtgatgtcttgaatcgtagatgagatatttgtgttgtctttcagcgtaataatgccttccttcgcaagtaacaacagtgcacgtccaccattggatgggtcatttggaattgctacttttgcgccatcagccaattcatccaaagacttaatcttcttggagtatccgccaaaaggttcaacatgaacaggtgttacagaaacgaggttgaatccacgttctttattctctgtgtccagatatggttggtgttggaagaagtttgcatccaattttttgtcagcaagttgctgattgggttgaacatagtcgttgaatgtaacgacttgcagacggataccttgtgcttccagttcaggcttgatgctttccagaatctctgcgtgtggtgtaggtgaagctccaactttcaattcaactgtacgaggtgcacctgctgaattgtctgcgccgctatcggcgtccttgttgtttccgcaagctgcgagaaccgcaatcaacataagactaagtagagcaaaagaccattttttcatgtgtaaaaccccttctctaatcattttgtcatgtggcgtccgcattattgcataaccatcatgttatctatgtgttatttcctggtgaaaaatgtaaccaagcgatctccagccatctggagaatttgcactagaatgatcatcgacactacggatatgatcataatttcattttgataacggaagtatccatagttgattgccagtgttcccagacctccaccaccaaccatgcccgccatcgccgtataggagacgagcgtaacaatggtgatcgttatacccgcaagcagtccaggcagcgcctcaggcagtaacacccgtcttacaatctgtccggtcgatgcacccatcgactgtgccgcttcaatgacaccacgatcaacttctcgcaacgtcgtctccaccaaacgagcaaaataaggagctgctgaaatcaccaaaggaggtataacgccgagcacccccgtagctgtaccgacgagtatacgagtgaatggaataagagcaacaatcaatatgataaatgggactgagcgcaaaatattcacaatcagggatagtatagtgtacactgcccgtgacttaatcgaagcagatcgggctgtcatgaacagcagtactccgagcggtaaacctaagataacggtaaacaagcctgatacacccaaaatttgcagtgtctctatggaagctttaccaacctcttcccaacgtacggttgaaaaatccatctaacgaagcacctccacatcaagtccctcagcggttaattctgatatcgtccgatcaatcgcatttgaatcaccctcgaaccgaacggtcagctgcccataaggaacctgtttgatcgtagagattgtaccttgcaggatggcaaaatccacgcctgttttacgtaccgttctagacaaaatcgcttcatacgttttgttacccagaaaggatatcttcacaagtttggaagcagcacctgcctgcaattcaacgcctgcatttgccagagcggtctcttccagagcaagtccagcttcatggtcacgcatcatgaagtcccgcgtaatcgcatgctgcggcttcaggaacacgtctgttacaggtccttgttccacaatgccaccttgatgaatgacagccaccttgtcacagatgttctgaatgacatgcatctcatgtgtgatcagcacaatcgttaggttgtacttttcattaatgtcgagtaataacttcaggattgaatttgtcgtctgcggatcaagtgccgaagtagcctcatcacagagaagtacatttggatcacttgcaagtgctctcgcaatccctacacgttgtttctggccacccgataattgagccggatatttgctgctgtggtgctccagaccaaccagtgcaagcatttccttcactttgcgatcaatggcatccttgggtgtattcacaagctttagtggaaaagctacattgtcatataccgttgccgaagataacagattaaagtgttgaaaaatcatcccgatcttgcgtctctgttgctgcaattcggttttgctcagttcagtcaggttgattccgtcgacccatacctcaccctccgtaggccgttccagcaaattaatgcagcgaatcaatgtgctttttccagctccggaatggccaatcacaccgtagatttcacccttttggatgctcaaattcagctcggataacgctgttgtagattttgcccctttgccgtacgttttcgttaaaccttttaattcaatcaatcgcacttgcccctttccaaacacctacatgtatctttacccgatctaaaggaaaactccccttaagtacaaaaaaagagccctttgcagatacaaagagggctcttcacgtgaaagaatataccttctcatctgccaaaatcgtgtcttgcaccattttgtaggaattagcacctaacatctataacgaatgatacatgtatcatgtcattacaaatcggttgccgggcttcatcgggcctgtccctccgccgctctcgataagaaatatgttgttgtaggattttataagttcatgtagtttatgctttataatgtgaacgtaacttccgaaatatcagttatatccatgtaacattcgattgaaactcagtatattccaagtattccgatttgtcaaagggaattatttcttttccatattttattgatataactataagaggctgttaacgtttcacagaccatatccacgccctgacgcatttcctgcacatgctgattcagatcctccaatttcactttaccttgcaaggtctggtgtaactgccacaggtcatcgtgcatttctgagttcatgtagtgaatttccatattacgtcgcttgcgcagcttgctcatcggttcacgataagagtccttgatctgtattaattgcaatgcaagatcatgatgctcccttgcatagtcgaactgccttaacacagtaaaataagaaaaatgcgctttggtattggaagtattcagctggaatatttcatttaatactgtgccgactttatccagaatggcaaagcagcggataaagccatctttgtagaaatacacataacgtgcatactcggctttttcagtcgccgtcatatcatccgttgagcctgcaacgacctttttgcgaaaatgagcagcagcgaaacagctttgctccagttcatccagtgaggagatgagtccctgagtccacacatacagtttccgatagtcatgcgtgggatcatggtccacatgcatttgtcgttgaaatagctcaagcgtatgcgccattgcgtccatcgctgccttcaatttaccttcgtttatacgtggcttttcccccaacaacgttcgcagcatatctaacctcctcttttccaaatcaacaagaattcatcaccgtaaacgaaacatcattcattccgtgtaattgctgcttgccataggttgccctgatccctctgacatcaaacaaagtccacctgtccaatgatgtacatatcactggatggtggactttcatatttagcccaagtacctttgaaaaagaatggatctatatcttagaaacgattagccgggcgatgtagcttgtacaccaggaaactcatatacgttaagactccaaacaatatggcgatatccagcatatgagcaagagctacgaacatgtatacttccggacggttcattgtcaccatcatgaaaataccaatgactacttgcatcagaataagaacaacggataccacacccagagtacgcatttccttgttgtccggatgattacggtaagcgaaatgacccaggattgcgataacaatcacgagcgacgcagctgctgcacggtgagcaaaagcaaccgctaccccacccgaaagctcaggaataatctgaccgttacaaagcggaaatccagaacatccaccggcagaatccgtgtgactcacaaatgcacctgtgtataccacgagatatgtgtaaatggtggagaaccagaccagattcctgaattttttgctaacccgagggtatttattcaggcgctccaatccgccatctttggcctcctgccttatgcccagcgccatcattagagaactcgcaaaagcaatcagtgcaaaaccaaaatgcagtgccatgactgctgaagattgggagaagacaacggcaaaagcccccatgattccctggacgataacaaataccagagttaagaaagaaaacaattgcaggtcacggcgtgacttgccaaaccgcagaaaagcaacaaacgaggcaatggacaacagtccagccagtgcacttacagcgcgatgggaatattcaatgagtgaagccacagtatgtgcgggaacgagttttccgttacataaaggccattctgttccacagccaaggcctgattccgttttggttacgatgcctccaccaaaagtggccagaaacatgacaagacaggttaatacggttaaccatttaaacaaagttaagtgtttcaattttttctcacccgctgttggtttaagatggcgaagaatattctccgcttgtttcggtactttgacacttatttcacaactaaattcattataccggataaaatgttcattgacgtcgcgctttgtgacaaaatgttaacgtctggtgaaataatgacccgcaggtcattgaggatatgtacagaaacgtttcttacatagaacgtgtcgaacacacaaacgccatttccctatttcaagagaaatggcgttctttttattatacccttttacaacatgaacctgtcatacttttatataagttcatgaaacatttacacaataacggagaggacagaaataaccagaagaagcggagcgttcgcctttatccccggatttctcccctttataaaagggatcaaagaaatctggggataacagcgatcggaaggttattctggcatcgtagtgcctgtgtgatattcatcatttgaacttatataacattatttatggatcgtgttgtacacctcaactgcgcgatccaggaactgctcaatctcttctctcgacttgcgcagcttgttcacataccgtacgagttcgcggccatctgtatatgccacaaagctcggaataccaagaatattctgctcttcactaaccgttccaacctgatccacgtcgacctcaatcaaggtcagttcacgtgcatatttctcttcaacctcaggcataaacggatcgatgtatttgcagtcaccacaccagtctgccttgaatacggcaatcgtcaaacgtggggattggatggctacatcaaaagccggtttggaagtaatctgttccattcggttcatctccctttctgtaccttgtcttaccctaagtgaagcaaattggcgagtggaagtcaaataatcagcgcatacttagaataaaccacatggtctgtgaaattaaacccagaacatcatgaaaggatgtcacatcatgacttccaccagaaccgattcttccagcgaacaacatcacgggtccctcctgcagatggtccgttccattccgggtgctgcccgggaaatctggcgtggcaaacaggctgcatggcaagcttcagcacagcttcgtcaccctttgcgtgacatcgagtgggataccgatacggcagctgccttacagtctgaggtggagcgttcgttacctgccagcggcaagtcttttgcacgcacggaccaggttcaaagtgcactcgtctgcgaagaagattgcatcattctggaagagattaagacactgactcaggagaataatcggagtaatatcacccgcacttcagcctatctagaatgttatgagcaatatcccgaactgcattgggcactgcttgcccatatggtctctcgcaacggcggatatcacatgacagatcttcagagtgacttaatgcataatctacagaatcaaagcgatcgcgagcatatgtaccggctgctggagcggtgcaatgcactcattttccaggatgcatatccccagcttctgctgtatatgaacagtcgccggatcggacgtagctgtttccatctcttgtcgcactttcacatatcggcgtttatgacaccgttttgggaacgcttttggctggaacgatgcagttcactgctaagtgtggcattaattattaatgagcagaactatatcgagagccgggtggtgcagcatccttattttcaaaaagaagtactatccaaacccgcattccatctgcataatctggccggtctgaatcatatcgtctttcctcttggacggggagcaggactcgcaggacgcgtcattgaacattttggcaaactagatgagcgaatcatgtttggcaaaggcctatatgcactattgtttggcgtggagcaagtacacacacaagtgttggagttcgcacgttcggttccccatcgtggctcgcgcgctgaatattggcctggcctgtttactgatcgtgaagacgaggcgggtgaacatacactttatgctcaggagctcctggatgaagaatggcttccagaagggcaacgattatatagtcctgaactgctctccgtatggggggacacgccttatgaaccgattaccagacatgactggcttcagactcgggattgtctcggttatctgacggcaccgcgtcggccatggctgtttgagatgagtcacgaacaccggtatggcatgctgaaaacagcactggctcatgatgctaaagctatcacacactaatgctgaagactatataaagcaggcaaagacggatgatgtgatgtccgatgtaccgctaatcctcgcttgttgggctaatgtcgagttcagtcgctcagcactccttaactatataaaaagccctgtccgcttaacagcagacagagcttgtatcctattttcacaaaatattggagcttgaatgatgctccttgcatttttaacctctttgcccagctccacgttgaagacgcataagtggacgaagaattttttgcagaatgcgagggtaactgcccagctcgtccttgcgcagtacacgcagcacaaccatgagaaccagatacaccaccacaacaagcacaccaaccacaaggcaggtaaacaagaaggatacacgcgctggcaggaacagtccaaagatcgtattcccaatccagttcgttgcaaatcctacacctgctgcaagcaacactgtaatgataaaccctttccaacgatctcccatgatggagaaatcaacgattttacgaaggacccgcagattcaggtacgtgatgaccaagaagcagagggccgttgcaataatgatgccgtaaatgccgaagatcggcgccagaatcagacttgcgatcagtttgatcacaacacctgctgcgacactgatcatcgtaatccgcggtttccctaccccgagtaaaatggagttggtggtcatcatcgtaatctggaaaatggtaccgaatgttaacaaggcaatgatcggcgttccatccagattggtaaacagcaatccgttgaccgaatacgctgccgcacaaagtgcaatgacaatcggcatacctgtcagaatcgaaatgcgcaaggcaagtgtaacctgacttttcagatgcgcttcatccttgcgggcaaatgctgccgatatgacaggcaccaacgattgactcaaagcgatagccagaatcggaggaatacccgcaatactttgggctttcgcacccaggatcgcaagtacaccagtcgcttcttcgagtccgatctgaccactaagcagtggtaccacaagggatgaatcgatgaagttaatggctggaaccgcaagtgaagacagcacaattggaatagacagcttgaagatatcactgtagatacctcgcatcggtaactgctctgcacgctcgtaattcaattgggccgcacggtcgctacgacgcagcttcaaggtgaagtacagcatgacaccaaaggcacccacacttcctaataccccaccaaatgaagcacccgcagcaatcgtctggtcatcataattccattgcagcatgacataagccacgataacggctgtacctacacgggcgaactgttccacgatctgtgaaataccgcctgctgtcatgttgccgcgtccctggaaatatcctcgcatcattgcaatagccgggaaaagtagtaacgctggagccaaggcgcgaatggcgctgaccgactccggtactttggacacatacgtggcataataaggtgccgcgaaccacaacaaagcagacatgactaccccggcaacagcggcaaagatcaaggctgcacggtagatctgttgggcttcactcgcgcgtccgagcgcataacgttccgataccattttactaagtgtactcggtatgcccgccgttgctacagttaacagcattaaatataccgtattggagatcgtaaatgatgcgttaccgatatcgccgaggatatgctccagcggcacccgttgaaccaatccgagtactcttgcgatcagcgcagcggccgccagaatgagcgtacccctaatgaatgtttctttcttagacaaacgaattccccttctttcctccacaccggacgtgcatcccgttgaagctaatcctgaacgtttaggcgaatcttaccacccagataataaagagaacaatcatgacgatttgcaaaataattttcatcacagtactcgtaaatagccccacaacggaaccaaatccaactttcgacgctttggaaggtgaagaccctccgatcagttccccgataaatgcaccgataaatggtcccagcaccagtccaaatgccggaatgacaaatggcccaatgataacaccaatggtactcagcgttgttgataacttggagccaccgaacttcttcacgccccatgcactgacgacataatcagccacaaacaacacaacaacaatcagaatctgaatgatccagaaccacacaccaaacggatcaaagctgaagaaccagccgtagaccagaaacgcgaagaaaatcgctacagcaccaggcagtatgggatataccgttccagccatccccactgcaaacagcagcacaattaaaatccaggcaacggttgcaagcaaaggttactcccccttcaaaatatgttcacggatcacttcaacaataccgtcttcattgttactcgctacgatcagatcagccgcttccttgacctgctcctgcgcattgcccattgctacacccagacccaccgcctcaatgacagccagatcattcaaactgtctccaacagcaacaacttcggacatctctatgcccagcagcttgcagacttccgctacaccactggctttggatacgccagcagggttgatctcaatattaacgggtgaagaattcgtcatttgcaggccacccatttgttgcagttccatcatgatctggtgacgaacttcatccacttccgtattaaagccgaatttcaaccattccagaccttcaatgttgtccgtccagcggtcacgattgaagagttcttccacggagtatgcccagtaccagctgttatatttctcaccaatttcctgcattttgctaatcaatgccgggtccatcagatgacgcatatgcagatcatgcggggctttccagacctcactaccattaacagtaaccatcggtgtctccagcccaagctggaccgcataaggcatcgcgtggaatacggctcttcctgtggaaaggcacacatgtacaccccgacgaatggcaatttgaatccacttggccgtctcctgtgtaatttcatgattatcgttaagtaacgttccatccatatccaatgcaagcaatttgtatttcagttcactcatacagtagttcctcctaggttgtctctctccaaattgaactcatggatatccattcaggcactacgcgggcagaaaacctttcgagtcgtagtatctttgttttagaattacctttttctttagtgtgttgagattatacgaggtaaccgttacgtgtacggatcgtcttccgatcgctgttgtctccaaattttctagattctctcttcttaaaggttagaaattcggagacaaaggcgaacgctatcgcttcttcagatcgattccgtccccttcactagatcacctttgtatttagagctcataacacctaacatcaagaaggaaattcataaacaaatttcccttctctaggtcctttctgccctctccgttccacaatggttctccagttcaacttaaaggttctctttatctattttaaacattctttcacaacaagatcgcccggcacccgtaacaacggacgctccggacgtcacagctaacgacattttaccacagatcatctgtatgcaacaaaataacccgtaatcagcaggatgacgctacattatcaatttatattgcatatgttatatccggttgcccttgtcaaagtaatacgaccagacacgcaaaaaaccgcctgcgatgcagacggcttcttataattttatttattcacctgttattcacttaaacttccattaccttgccgcgaatttgcgacgagcgtaacggaatacgatgccatgtttcggtgacagcagcagtgcaagaacaaacagaattccagcaacagctaccatacagcccgcaatggaagcatccagggcgtatgccatgatgtaacctccaaccgaggatgctgctccgattaggacggcatacagaatcattttgcccagacgatcagtgagaaggtaagccgccgccgcaggtacaatcagcatgcccacaacgagaatcgaaccaacactctcaaatgaagctacggacgtcatcgaaacgagtcccatgagcagatagtggaacaacactactggaatgccgcaggccgcagccagcgccggatcgaaggcacatagcttgaactgtttgtagaacagcccaatgacgacgaggatgactagtaaagtgatacctagcatccagaccgccctcggcccgacatccgtacccccaagggttagcgtatcccactgtacataagcgatctcaccgaacaaaacacagtccagatccagatcaatatgctgggcgttcagactaatcagaatgacccctactgcgaagagtgctgtgaacacaattccgatcgaggcatcagacgacagtcctcccgcctgcaaactctgtatgaagaacaccgtcagtagtccaaacaccgttgcaccaagtagcatccacaatgaatctctggaaccgctccacaggaaagcaatcgcaataccagggagaaccgcatggctgatcgcatcaccgaccagagccattcgccgcagaatcagaaaacaaccgaggatggcgcaggcggaagaaaccaatacggccgttaagataatccaaaacgttgccattacatctccccccgttcctgctgatttcgttgtgtggcgagagtctggagtgtagcccgctcttcacgcatatacgccgattttgcctgaatactacgcaaacgtcgagctaataatccacgacgcggagccagtaaggctgacccggcaaacaacaccgtagccgcaagaacggttacaggtcctgtcggcagattaggtacaagcgtactgaagatagtccctgttgcaccactcaatgcaccaaatatgccagccaataccaccatcagtgcgagtgagtcggtccagcaacgtgccgctgctgctggggttaccagcaaggccgcaacaagcacgacaccaacggcttgtattccggccaccaccgcgattaccgttaagagcaggatgagctgctccaacatggcaactggcagtcccatacctcttgcaaagcctgggtcaaaactcaccagtttgaattccttgaaccaggcaagacaggcaatcagtaatacgagacatacgccacccatgacatacacatccgtcataaccatggatgccgcctgcccaaacaaatatttatcgagtccgctttgacttccgctcgccccatgctggatgcgcgtcagcatcactacaccaaccccgaaaaagacggtcagcacaattcccatcgccgcatcctgcttgattcgggagtagcgcgtaatccacgagattccgaaggtagcgacaatgccagccaccagagcaccgaacaggaataatccgaccgacttcgtttccgtcaacataaatgcaatacagatcccaggcagagcagcatgagcaagggtatcccccatcaagctctgtttacgaagaaaggtgaaggagccaataattccgctactgaatcctaacaacagacagccaagcaatatccaacgtgtattggggtcagataagatggcaacgatccagttccacatgcactacacctggcctttctccgtccggcttccgatcatcgcaatccggcctccgtacgtctcttgtagtgtatccggtacaaatacttcacttgtcggcccacctgccaccagtcgtccattgagcagcagcacatggtcgaagtattcctcgactgtcgccagatcatggtgaacaaccagtacggtcttgccttgtttcttcaactgttccaaaagcgaaatgatcgctttctccgtggtggcatcgacacctgcaaatggctcatccatgaaatacagatccgcgtcttgcacgagtgcccgcgccagaaagacacgctgctgctgtccaccggacagctgactgatctggcggtacatgtaatcacccatgccgacttgctccaggcagtgtgccgccagatcccgctcttttttccccgggcgacggaaccagcctagatgaccataccgtcccatcatcaccacatcgagtgcatgcgttggaaaatcccagtccaccgattcccgttggggcacataaccgatgcggcgacgttgttccctgtacgattgtccaaagatccgtacctctccatgcatcttcggtacgagtcccagaaccgctttgatcagggtggattttcctgcaccatttggtccgagaattccgatgagctgtccttccggaatatcgaaggatacgctgctaagcacaggctttttgtgatatgcaacagccagatccctcacactaagaggagccgatgttggctgcgttccctgcaagtgactgttgttcagtttcgtaggagtttgttccaataaagttgtatcttccataatcctgtaactcctctcttcatgtgattcattatttcagggcttctacaatcgtctcaacattgtggcgaatcataccgatgtatgtgccttcttccgttccctcagcccccatggcatccgagaacagttctccgccaatgctgaccgtatgtcctttttgagctgctccggcaatgatggcttccatcgcttttgcaggcacactcgattcaacaaatactgctttgatatggttatctacgagataatcccgcagttcgctaacatcttttgctccgtattcggctgcagtactgatgccctgaagccccatcactttcatgccatatgcctgaccgaaatatccaaatgcatcatgcgccgtaaccaatacccggcttgcttccggaatctccagaatcttctcacgcacctctgcatccagtgcttcgagcttcgccagatacgcctctgcctgagccttgtactcttctgcatggtccgggtccgcctccacgagcgtatcgcgtacggcttctgccgcatgcatccagtggctgacgttaaaccagacgtgtggatcatattcggtgccgcctgtatctttgcctgagtgtaactcctcgactggaatagtctctgtaacagcagtaaccagcttgcttgaggacattttctccaaaatgtctgtcattttgccttcaagatgcagtccattatagaaaatgacttttgcttgttccagcttgcgaatatcaccttgggatgccttgtacaagtggggatcaacgcccgggcccattagcccggtaacatcaacatatgccccgcctacctcacgtgctacgtcagcgatcattcctgttgtagcggttacttgtagcttgccatcactgcttgtctctgcatcactggagcatgccgtaagtacaacaatcagaaccagagcggctagcgtaatgaaccccctctgaatactcctcattttcaccattaacaattcaaccgtcccctttccctctcctaaaatacttgtctacatctaattttgttgtacaaggtattaagttttaatcaagactaataatgtttcccttgtgcaaattttatccgaagccaaaaaaaaaggcaagggattatttcccctgcctgtccaaattcatatgttgttcacttcattaacctgttagatgtgatgttaaaagagctaacttccgcgaggttcttttgcattactctttgtctttcccttcgcctttcttacctttcggcgttccatcgagaccatacacttcatcatatgcatcgaaaatttttcgtgctattggtgaagcactgactgacccgaatccaccttccggtacaacaacagcgacagcaagcttcggattatctcttggtgcaaaggcaataaagacaccattctcttttttgttcggtccggtcccctgctctgatgttcctgttttccgtgcataatcgtaggggaaaccgtcaaatgaacttactttggtaaccatacctttgtgaacttcattccagtgagcatcggcaaaatcaacttcattgagcaccttaggtttgatctctttcaccacattgccgtccgcgtcacgtatttccttcaccagatgtggttccatccgtttgcccttattagcaagcatggtcgtgtattgggcgagttgcatcgtggtgtacttggcttgttgtccaaaggaggcaaatgccaaacgtgttagagctgattcgtcttcattagtatattctagcctacccagaaattcattaggcagatctacaccagtggacacacccaagccaaattcctgcatgtgtttatgccagacatcgatacctttctctgagccatatttacttaacaaacgtttccccaccatatcaatcatgaaggcattggaggatttctcaatcgctcttctcgccgtaatagaaccattataagcagaatgcgagttcttcacttgtcggccatctttccccaaaaccgcatatccctgatcatgataggtctgtcctgctgtaaataatccctctttcaatccaattaggacacttaacggcttgattactgatccaagaagtataacggattccgcccgactaggcttggcatcattcggtgggaacgactcggtggttccgttccggaatacatatttgattttatcataatcccaatcgttcggatcataatctggcatacttgccatagccaccacattccccgtatccacttccatggctactgcgtatccagtaattgccttgggaagtcttcgcaattcgtccgttatcgcctcttgtgcagccatctgaatctccttgttaatggtggaaaccagactgtagcctttctccggtggtgtttgtaacatcgtcccatctgggagattacgtgcgtcaatatcaatggactgatatccgcttcgtccacggagttcttcctggtattgaagctccagcccatcgaagccaaccttctcttcttcatggtacacaagaccaggatcacgctgggtacttgccccctcacggatggccttatatttggcaatggaatctggtgctcgcttgaactctcttgtgtaacccacaacctgaacggctacaccatccgggtcatattttcttatgttttcttccagcaccataacgcccggatattccgcttttttctccatgaaaaaggcaatttctttggtcgatagatccgacttcacaagcctcggcacatacccaaacgttttctggtaatccagatccaatcgtttgatgatctcttccccgtccggttgctctttatcccctggattaaactgcttaaacacagccgccagatcatgagccagttcctctgcttcctgtctacgttcatcattccgataatcctcatataacagtacatacagggactgtacaggttcggaataagccagcgcgacttcccctgtcgcatcatagatgggaccacgaacaggtgcgagtggaatgtctttggtattacgactcgtttccatatacgtcagttcaggaccctccacaaattgcacaaaggctaatctgaaaataaggatactgaatatgacaaatgccgcgaaaaaaaacagattcagccttgcggtggaaggcttgttgacgggtgtatcttcctcagtcatgggtttcttcctcaatcggttaaacatgttttaagcctctcccgttcctctataaaaataaaatatttaatccgtcttgtgaacgcgttcaatccgatttttaatcctttctcaaccaagtctaccaaaggttagctgtcacgtctttcaatatttggttacattttcgtaaacagaacttttacactaccccatctaccgatttcaatgtaaacactgacatatcaacgttgtcccgctctccagatcgcgtttacccttcccttatataaacgtggtacagctcatatggttacatattaatgcaactaattagttcactcttacgatccattctccacgtaaaaacaaaaagaggacccccgaagggtcccctctgtaaccaatgcctcacattactgtgtgcctgattccgaatctgaatctttatttttgtcttttttcggtacaccgtcgagaccgaattcctcgtcataggcatcgaagatcgcacgtgcaaccggagccgcactgctcgatccaaagcccccttcggggataaccacagcgacagcaagctttggattattacgtggtgcataggcgataaatacaccgttatccaccagtttaccgcctactacctgtgtcgatgttcctgtttttctagcaaagtcataagggaatccgctaaatgcagatacctcggttgccatgcctcgttgtacttcattccagtaggcatcgttaaactccaccgtgctgagtaccttcggttttactttctcgaccacgttgccttccgaatcccggaactctctaaccaattgtggctccatccgctttcctttgttcgccagcattgtcgtgtactgtgctaactgcatggttgtgtattttccctgctgtccaaaggaaccatacacgagacgagtcagcgagctttccgtgtcgttcatgtaatcccgtatgcccaggaattcattcggcagatcaacccctgtagataccccaaggccgaactgcttcatgtattcatcccatttgtcaattccggtcgcaccgtattttgagtacatcttcttcccgatctcatcaatcatgaatacgttcgaggaatgacgaatcgcatcacgaggatacattgcaccatacacatgccctgatgagttctgcactctgcgattgtccccaccaaaggtcgttgaacctctatccgaataaaccgtattggtagtgaagaaaccttctttcaaaccgatcaagacactaagcggtttgatggtggaaccgagtagcacgatcgattcagctcgctttttagagtcatccggagggaatgaacgaatcgtaccattttgatacacatatttgatatcatcatactgatcatttgtgatactgcctgttctccagatgttggtatcataatctggcatactggcagcagatacgattttccccgtatccacttccatcgcaactgcaaatccggtcttggcattcggatgtaatcgaccggaaacctgattccgatgaagccaactcaactgatccagaatggcctgttctgttttcacctgaacgtttttgttaatgctggaaatcaggtcgtaccctttctgcggcggggtagaacctgctacaccttcaggcaagttacgcaaatcaacatcaacggatgtatatccgcttttgccgcggagagcatcctgatattgcagttccagtccatcaaagcctacaaattcattctccgtatacaccaggcccggatccgtttgcgttttattggcctcgtccacctctttgtatttgttcaaggacttcgaacttctgaacttcttcagataaccgatggtctgaaccgctaccgtatccggatcgtagaatcgtacactctcctcgacgatctgaatacctttgaactcgtccttgtgctgtaggaaataagcaacttcttcctcggacagatcactcttgatcagacgtggcataaaaccgttcgctttgcgggagttcaagtccatctcttcaataattttctccaccgtaagtggctctgagtccttcagcttgtactgttcaaatacatcgtgcaaccgggttgcaatatcctgcacttcccctatgttaggactcggtttcccatcaacatccccatagtttttatacagtgtcaggtagagagactgaatgggcttggagtaagccaacttcacctcacctgtagaatcatagatcgtgcctctcacaggaggaagtggtacatccttggtaatgttacttgcttcttcctggctaagttcaggcccttccacgaattgcaaaaaggccaaacgtacaataataacgctaaaaataacaaaggaagcgaagaaaaatacgttcattcggtaactgaagcgccgtttgtccgtaagttcatccttctcattggaatgttttttcatccatcctacctctttcatgacttgatgcataccgctcaaactgattctccgcggcatgataacctggcaacgtcgtcatattccggacccatgtccgttgtattgctaagctgattgatcctttagatgggtgtcggcaaaattcggaggattaaaccagtctccactgatcgcccatgtcgggtcaagcggaacccagctctcggaaccactcaaatacacctcattccacgcatgcggaccgtaccctccctggccgttataaccaagtcctgtaacaactttgacttcaagtccttgtgaacgggccatcacggcataaagacgggcataatcaatacatacgcctttgcgtgtatcaaatgtattctgtggattttgttcatgccatatgcccttttgctcatagtcatccactttaccatagtcatactgaatacgtgaacctacccagtcgtatagcgctcttgctttggcttcatctgtcgattggcctttgacaatctcactcgctgcagattcaatatccgtcggaatattgtggtcgatgacttcatatttgcgttgcaggatgccgcccagttccttctgcacagcctgcgtaaatacgggtagcttgtccttaatgaacgtgccggacaacggttcgataactgatttggccccttgcatatagatcggggatgcttccacatatcggctgaacatgcttccagggtaaagactgacaatcatgaacaaaactgcgatgacaatcattccgcggacggagcctatgatcgtgccaatgaatgcacccgtcaagcgactaaacatacctttaggtgcactttcctcggctgacctctgcctgctgctaaaaataaatgaagagagaaacccgagaatcagtcggatgagtccatagctaagtacaaataatacagcgaaccgcatcagcggaaaatctgcaatcgccgtaaccaacgtataatacatctgttcccaccggttcaactcacggttaggcatggctgaagcatactcagacagccactgctgtacatatggcgcaagccacaacgttaaaccgatcgacaacagaataccaatgaccgccataatgccatccatcaggaacccaaagagtctgcctgctgaacgcgaagcccctctggaccaaccctgcaataatgaagcagccacaatcagcaacagcataatcgtgatgccattcaattccttcaggctgtccagccaattctgcagcacgtaccgattccccctttactacgatgctggtgctgttttgttctcctgtgcctgttcgacaaacgtacgtatagtttcattgtcgagtttccattcgccaagtgaaattccgcggaaggtcacatcaactttatccgattgagttctgcccttaatctccacattgggacttgtgatggtgaacgctccatcctgtcctttgacgtatttcgctttggaagcctccttaagcatcatgctggttgcttccttcttcaatgtgtccatcgtgctggattgtacgtctgtcactgtctgtttgatctgatcaatggagatgccgctgtatatcagtagagccgcaataatgatgatggcaatcgcccatttcaatacggttttgaccacattcagaacaaagaacaatatgatcaatgcaaccacgatcaccagccagttctgcatcacaaactctttgattacttctatgttcatgactacaccttccgtattagaattcattcgtaacactcccgaatattatacatgatttccgaagctgctgtcagctaagccctctcccttaaaaataaacggtctaagttcgtcccgccgggcgtacaagtagtaccatgaggttctgccgggcgaacggggaacacgttcaagacctgtagtttgaacatgcatcgcttaacaaggaggggcttatgtgaaaacggccatctggctatacctgtttttgttccttgctgtatttgatttgcacgcccagtatcccattctgaccccttttgccatctcgctgggagccgcccctactttcattggctggatgatgggcatctattccttaacgcatcttcctggcaatctgattgctggaacacaaatcgataaacatgggagtcgccgctacattgtattcagtctgctcggagcaggattcatcctgctcttacaagcctatgtccagacaccatggcaactgctggcgttgcgttccatcagcgggtttgtactggccttcctgtctcctgcatgtctcgccctgcttgcacagttatccagcgatccggtgaaacaggggaagtatatgtcgggtcacggggtagtacataccctcgcttctgttgtatcgccagcagccggtgcgatcattgtgggttccatgggattctctgctacattctcaggcttgggttatctgcttattctcacaggtgtcattgctttcatgacgatgccccgtggtatcgtcaaacagcaggagagagtaacggtacctgctaaacctgacgcttcaccagcagatgccacaagtgcattcctgccggtgtcctggcgatactttgccttgcctctggtgattgcctgtgcccaagggattctcttcttcgaattacccctgcggggaggaggacaatcgtccatcatgtctaccggactgctgttctctattatcagtattggggcactcttcaccctcagcatgttatttctcaatcggtattcccccaagctgcgtctggttgcgggcgtgctgttaatgtccttgtgtttttttgtgatggcagccattccgcaagttccgttgaccaccgtattgtttgtacttgggatgtccaaaggcatcatctttccagctatggctactctatttatccgtctgagcggaggaagcaagttgggccgcattttctcgctgcaatccattgccacctccatcggctctttcatcggccccatcacagccgggcaacttcgtgtcgggttatcaccctatttcatcgcgtttcttttgttaatgattggtatgctgctgcttccatactatacatccagacgcgaagctcccctgtccgatccgaaaagtatattaaattaggcctgtatcactctcttcttccctactgttatgacagcaattaggtctgtattttcattagctttgcatcattcccccatttacagctaaactatataaaatgaacaacgttttacacgttgataaaagctaattgggaaatctatcttttacaatcaccgaaggttttatcttattgaagatcaataaggttgaacaattagccaaaagtagtgaaggggacggaatcgattttgaagaagcggtagcgttcgcctttgtctccatatttcaatctataaaaaattaatcaaaaatatatggagacaacagcgatcggaagaacgatccgtaaccggaacggccacttcaagctattactgacctaatgatgcacataaaataagatttcagagaattgtcttgatgggttgttctatccagttagcagtcgtgtaaagaaaggagtccattttatataatcagtcgattttcgctgcaacatttcccggggaatgtcgacataagctctcgaacaagaggtgaatatcatgcctattcatgtcattgtggaaggtaagaatgaccgaagcaaactgaaacgtctggttggacccgaaatcaacattctatgtacgtttggaacacttaattccctcaagttggagaccctgcgcaagcaggtcggttatgatgaagtctttttatttatggataatgacagttccggcaaaaaaattagaggtgtacttcgggatgctttcccggatgcagtacagatgtatacacgacgaggatatgcgggtgtggaaggaacacctgatgagtatatcattgcccagctggagaaagccgggttagagacatacatccaataccctgaacatccttccttttaaaatgaaataccaaaaggctgcctttggattgatatccaaccagaaggcagcctttacagtatgatgatcagatgattattccttaatcagattgcgaatatcctcggcaatgacagcaggcacaacgtcctctgtattaaatgcattatataccttgcgcagctggttgttctcatccaccagaccaatcatattcatatgggcaaaatcgtccttactctccccatcgatcaggatctggaatgattccctagccaactgtttggttttgtccatatcccctcgcaagaagtaccatccggaataatccgcgtggaagcggtccgcaaacgtcttaatcttctctcttgtatcgactttggggtcgaatgaaatagatacaaatgagacgtctttaccaaaggtgtcgtcctctttcaacagatcctgcacctgggataacgtaaaggtcgtaatagggcagacatccggacaactggtgaaataaaagtagaacaatcggactttcccttgcgtatcctccagtgatactgtattgccatctacattttccatggaaaaggattggatttcacgaatctcgggtaatttttccttactggcaaatacagtgccccacatcagatacacagccattattagtgcgagcccgagcagcatccatgtccatttgtactttttcagcattttcctcgtcccttctgtatttcctcttatgaatacgcatacatatgtgaatccaaaatcacgttcgtttcgctttatccatctactgtgacatatgtattcaaagaaacctactttttatgagattctatattattgtaacggtttaaaggaacaatgcccataaatatttatgtaatataaccgaccgcgcattgtctgccgcattttttctcagtatccgatataaagtttatcataggaactgccaaaatagtttgacaaactacgtacatttattgggtatggcacagaaaattgtcataactttgaaattagggatgttttgcatcctgacaaacggatattatacactatatatgggtatcacctagatagagaagtaatatgccttagaacgatataccacacaaaggagacgtttatggatacctctacacattttgtcatggggattggtctagccggtctggcttatgtcgatcctgtcgtcgcggcgagtcccatgcttgcagctgcggtaatggttggcacgatcgccggttcccaggcccctgacattgatactgcgttacgtctcaaaagcaattcgctttacattcggaatcatcggggcttgtcacactctctgccatttctcctgttatgggttttgctcatcaccggcgtcattgcactgatattccctggtgttcctattggacacgttgccacctggaccgctgtggccgtaggctttcacgtattcaccgatctgttcaacacctatggaacccaagccgcccggccttttacggaacgctggatcgcctggaacatcattcatatttttgatccgtttctattcactacacatgtcatagctatcctgttatgggcctttgatctgatcgcccctgcaccactcttcgttacgttgtatagtttgaccggtttatattatatatggcgaacgattgctcgtgcacaagcagtcagaaaagtcagacgtctcgacaacagcccagagcaggcaagatacatcgttattccaacgatatcctggaaccgctggcatgtggttaaacgagttgaggacggcagttatgtgatcggtaaaatggatggttctaatctggtatggagtctgcacgcttcgtcttctactcatgcggccgttgctgcttcacgcaaatcaccggaagtcagtgccttcctttatttcacctcctatgcggtggcagaggttgaagaactgcctgccggttacaaggtccgttgggcagatgtacgttatcgacaccggaaacaatatccatttgtcgctgtgattgtgatggatcggaattttgagacgattgatacgtatgtaggctggttaagcgatgagaaaatggataaaaaacttttatctgcacgcccttgacgaagtgagcatggcaaggcacaatcagacataggaactgatacgcgagaaagcccggagcgtttccgctccgggctttctgtttatcctgttttgttgctgttggttaaaataaattatttgccagacccagccagagactgctcagcgatttgtaccagacgtttggtgatatatccacccaaagatcctgtttcacgggaagtgtagttaccatagtaaccgtcttgtgggatagttacacccagttcctgtgcagcctcgattttcaattgttgcagtgctgaatttgcctgaggtaccaccaagttgttagaacgagatccttgagccatatttataatctcccttcaatctgtgtctgtaatgtaattgcaagcttgcaagattattatggctcgtaggctacaggttatacggagttttactaaatttgtagatggaggtttttcccaatgagtaaaggcttgtctttatggttcgcattctcttcgattatcttgttaacggtttcagcaattatgatctcctactccggttggtttgctgcactactgtttgtcctgtccattgccaacattggctggggatttgtgattcgcgccaaaaaagaacgtcaggaagttcgctcggctgcttcagagcccacttcttgagcaggtcatttgatagttcaataatgaacgcatgaataaagaggagtccttcaatagggctcctctttatttatgttaactattcattgcatgaaatgaagatctttgttcacgactactgtttacgtctcggaacaaatcccatacgttctttcactgcatccaacgtttgagcagcaacttcttctgcacgacgggctgacgtatccagaacatccgccaattcgccagactcacgaatctcattatatcgttgttgcagcggttcaatcacagatacaaccacttcagccagttcctttttgaatggaccgtacatcttgccttcataacgctcagctacttccttaagcgtcatacctgcacattcagcatagatactcatcaggttgctgacttccggtttgtttgccggatcatatacgacttcacgtcccgaatctgtagtggcacgactgatttttttgcgaatcacatccggcggatccagcagggcaatatagctgccagcgttagggttacttttgctcattttcgaagaggcatcatcaagtgacattacccgagcacccacctgcggaatatacggatctggaatggtgaagtactccccataacggtggttaaaacgtcctgccagatcacgtgtcagttccagatgctgcttctggtcctcacctactggtacaaggtcagcattgtataacaaaatatcagccgccattaatgatggatacacaaacagtccggcaccaaccgaatctttaccggatgatttatccttaaactgagtcatgcgttcaagctcacccatggaggtcagcgttgtcatcaaccatcccaattccgcgtgctgcggtacatgggattgcagaaatacgttagatttcgaaggatcaatacctgctgcaataaacagtgcagctaccgcttccgactgttcacgcaatgctgctggctcctgagccacggtgatggcatgaagatcaaccaccatgaaatgacattgatagtcatgctggagttttacaaaatttttgattgcaccaatatagttgcccaatgtgagcttaccgcttggctgaatacctgaaagtactgttttcattacacataacgcctccctgattgtatataaaaaaactcctgccattctctgcgaacgcaaaaaggccccacatccgcaagggacgtgagaccgtggtgccacccttattcgcttttcttcgattgctcctgaccctgaatcaagtcaagccgaagaaatgccttcattgttccgtaacgtggattatacggcagactctagtggggcaagcccatctctggcttaacctgttcaaacctacactcaagggtccattcggtaaagagctcacaccggttcacatcaaccaccggctttctgaagaggattctcttggcctacttatccctgtcatcgatttcatgtcatttaattctaataaatgcttttagagttccatcttaatgcgcacaggcgtgaatgtcaaaatgagttgaacttttttacccgagacatcaaaatctgttatgatggaattgcttatcctgttgcctgcttcacacgaaatagcgcaggaaatcgctggcatgtacacaacgacacgcctgcagcagtagcttcatcacaactgcttgcagacagatttcaagtgggaaaaggagcatcgatatgaaacaagtgaccaaaggccaatggaatggttacgacacgtatatcctacatagccgtgaattggaaatcaccctgctgccgcgtcttggaaataatattatttctattcgcgatttagtgcaggacagagatgtcgtccgccgtccggatgaagacgatcttgccttttatctgcagaagccgtaccattttggcgttcctctcctgattccaccagggcgcattcatcgtggacaattcgaatatgaaggcgttcgttaccagtttgatcagaacacggcgaatgacaaccatattcacggtctccaccgtacccaatcctggtgtgtcagtgacattgaggaagatgaagacggctgtgcaattacgactgaattactgaccgaaaatgaagagcattggatggcccaattcccgattcccctaaaacttgagatgacgttcagtctgcaaaacgctgtatttagccagcgtctgcgagtgaccaatctgagctcaacgcctgctccttttgggatgggatatcatacatggtttttgttagacggcaaacctgccgactggacactgcaactgcctgtttccggaatatacggacagaatgaagaacaactaccgacaggtgatctggaatccctgggtgaatggtctgctctgaacgaaggcatcaatttgcagggacgtaactgggataccctgttgaaagctaccgaaggtgaaccggctacggcttacttacgcaggcaagatggatatacattgaaatattcagcagatgaagcatttttcaaacattgggttctctttaccaaaggtgaatctgatcagttcttgtgcattgaaccgtacacttggctcccggatgcacctaatttggctttatcggatgaacaaaccgggttgattcgcttagaaccggaacagcctgttgagttatttacacgtattgaggttatacctcctacagagtaagcgagctgatcatcctatattttgcttttacgcatatcaccctatattttgatatccaaatacaacttgccgacccgcattgggtcggcttttttatgtgtcctgtgcactgatagttatccatattttcccttacgccatatcatgtatatttccgatttctctaaccatactaacatcaccaacccataaggaggtgacacatatgtacggaagtcaaaaccaaggtagcggtagccgctccaacaacctggtcgttccccaagcaacagcagcattgcaacaattgaaaattgaagctgctcaagagctgggtgtaactattccacaagatggttactacggtaactatacttcccgtgagacaggttctctgggtggatacatcactaaacgtctggtgcaaatcgctgagcagcaattatcgggtcgttcgtaagctcgtaattattgcttgagcctaagcagaatccaaaagtaaaagcggccttcttcggaagtgccgctttctcttgtgcaactaattaggaggtcgactccatatctgaatccttgtatgtattggttctagggtaacgaatcatcaggctcgccatattgtaattagactccatcgttgcatctaccaaaatcataccttgtcttactgtgaagtcgtacgatatttcgccatgcgtccaattgcgtttgaatttcaacgtctccagtgccatcgcccggaaagaagttctctgggttacgtttagccccccttcctccacatccatctgcccatctcgtccagctatcggattatgtcgaataccgaatttcccaattacgttgtttcgtatttgcacaaaaactacccctgaatctaaccccgataactcatgatcaagttctttgaataccagatccaactgtctcgctaatgaaagctcatcaattttcatattaacactctccttatatgcttatagtcctatacagcaaggacttacgactcattatatgacatcatatgtgctcattcaacaaagaacggcaaagttgggtatttctaactatgatttgcacaattaattgccattccactcccttaaactgagctttttcaattaattacgacaaaatattcgagaatcaaaagtgaggattctgtacaaaaaaaggctgcaatcctgtgtctgttaacacggaattgcagcctttttatatatattcaacctattatattcaacctatttttcggttgctgtcatctgcagaaactgctcaatatcggcaataaccaagtccgcagcattttgccagaattccggttgtgtcaggtccgtacccagatgtttctgagcaagttcttcaaccgtcatacgccctgtatcccgcaacaaatcatcgtatttatctgcaaatgctgtaccttcctgctgtgctctcgcatagattcccgcactgaacatataaccgaacgtgtatgggaaattatagaatggcacacctgtcagatagaaatgcagtttggatgcccagaaatgaggatgatctgatgcaagcacaccgcagaacgcttcctgctgggcctccaccattaatttggataattcatctgcgttgaccaagccttttttgcgttgctcatagaaacgattctcaaacaggaaccgggcatggatgttcataaagaaagccacacttcgctgtatcttgtcttccagcaaagccagcttctcttgctcatctgttgccgcctgcaccagggcatctgctacaatcagttcagcaaacgtagacgctgtctcagccacattcatcgcataacgctgattcaatgcgggcaactcttccatgatgtgttgatgatatccatgaccaagttcatgcgcaagagtcgacacattagatggtgtcccggagaaggtcatgaaaattcgggttgctttgctaagtggcaaagacgtacagaatccgcctggacgcttgccaggacggtcttctgcttcgatccaacgtttctcaaaagccatctctgcaaacgaagaaagtttaggactgaacttggcaaactgttcaacaatattgatggctgcctcctcgtaagtgattttgccactcgatttacctacaggtgcatctacgtcgctccagctgagcttgtctacccccagcagttctgccttgcgctccagatattgaacaagcgcaggtttggcaccgttaatcacatcccacatcgtatccagtgtctgacgtgacatccggttgatggccagaggttctttgaggatatcatcccagccacgtttctcatataacttcagacggaatcccgcgaggtgattcagggtgtcagcgcagaaatcttcgacatcggtccaagcctgctcccagtttgcgaataccgtctcacgtacattccgatcactatcgctcagcttgttggcagcctgtcctgcggagagtatcaccgtttccccatcttgctcaaatggaatgttcaccttgctgacaatcgtgttgtagaatttgccccaaccatggtaaccatccacacccagatccagagcaagaccttccagttccggcgacagcttctcacgtgccagcgtgcgactctcgttcagtacaaatgccagcggcttaatatcttcccgagcaatccaagcgtcccacaccgaatctgatgtctgactgagtgtattatcgaacttcgacttactgccgttcagcatcgctgcaatagaactgatggcgccttgaagctgcgttgcctttttgtccttctggttttgcgatgagaggcaggatacaaacgcagaaccttccgatacgcgcatataacagctttgcagcagttccaaaatcggatcaaatgcagccgtctcctctaatgaagtcggtgcagctgtttcgttcaacagatgttgcagtttacgtacatcctcttccagttcaatcagatacgcagcgaatgtctcggaggaagaacctccactaaaaatggactccagatcccatacggggtgtaatggcgttttcatttaataaggcacctctctctataaattggatggttaggattgaattaaaaactggttttctgtgggccatatctctatactagagaaatacttatagcaaccttcaggaggtaaacgtatgaaacctttacaagtatcggctgatacagccgtcaaattagcagaatccctgggcgtacccttggagcacctgatgcacatgccccaacatatcctgatgcagaagattgcggaactcgccaaacaagaagcctccaaaccttccgcaccagaaggcgaacaagaatgattccgtttgagaacagctggccttacgatattgtgatgggagacatctatgtacagcaatgtccctactgtcatgcaagcaacgtgctgctccccctcaaaccaaaagagcttgtgctcattcgcgaaggcaaaaagaaattactggtctttccctgttgtaatacaagcatgaccgtgatcgacaacgacagtgactatttgttatccagccgtcctgtccgtaactaatgtaagatcaacttagagggggctgcgcttcgcagcctctttgtctgtttccagcatctcttcagggagttccaacttacttgaaatcatctgctcacgcagcacggcccactgttcccttgaagcacgaatcatggccgcatctgtgatccgcttgtcatgaatgaccttgctgaaccattgcactgcttcattaaaccgtcctaccctgcggttcaattccccgagcaaatacaacagtttagcttcattgccacccgttccttcacgttcgaacaccttcacataggcttccaggctaaattcaagaaaacgatgttcctgggcatggtcctccatataacgatacaaccaagctatatgatgcaacagaccagcgacgacacgatctttctcctggataacctgtgcgcacagcaaggcaagcttgtacgttgccaacgcctgttccagtgttcgtgctccgctataatcacgtttaacccagcggttaccgatctgttccttaaaagccttgcgctgagcatcatttaaatgctccgttgcgttctccgtcgtggcaaacccgcactgcggacagatgcgaaccacataaaaatctggattctccagcttgtagtaagcacaaaaatccgaatccgtccggtatggccttttcaaactcggtcttacccgtgaggtttcatactcggtttcgcaataatggcaggtcactttcaccttatacagcggctctaattccaatctcttccatccctctcccgtacgcttataatcatattcggatctacggtgtattcacaaaatgatgtgcaggcccggataaacgctgcaggataaacgaatgcaagggctcctccacaccaatctgtgttaaggcttgatccatacatgcaagccacgcctcagctcgttcaaccgtcacttcaaagtgcatatgacgggcacgcatcattggatgtccaaacgcctcggaaaacagaccaggtcctccaaaaaactgagacaaaaacatatactgcttgtcgatgaccggctgaatatcttccgggaaaagcggagccagttgctcattctgctgaacgatcggataaaaggcctcgaccagtgcgcgaacacctttctcaccgccaagattgtcataaatactcaaactgggattcattcgtctgattcccctttctgatgtcgaattttgccatatattacacgttccgtgaacattgtgaaaacagtaacaatatccaggccacaaaagcctttatctccattctatcaaaaaaaaccaaaaagtcctatataacatgaaatcatctggacatgtaacctgccatctgtatataggacccttttcaaaaatagcacaaaaaaagcgccaaccgcttgggttggcgcactagatatttcattaataactccgccagtcctcttcctcagagcgtaccagcgaggcacgtatcacatatacaaaagcacagaccaggattccggtgacaagactcatgatcatcactccatccgaattgaattccaccttggagacaattaggtgacgttcaggcgtttttctcattttagcacacatcactcaaaaacacagccacttttgcaagcgctttctacgtataattttgtactgtttgtccactttttttcatatattgatggcaataacatcacagacttccgcacaccgaccattccaaatataaaggagaagaattcatggctgcttcacaacgactcacccatgtcctggtcacactcgctctcctgatcctttgtgtgttaatggtcttgtatccagcggaaacctggcatgcaggtgtacgcggactgtccatctggtgggacgtattgtttccctccctttttccttttttggtgctgtccgagctgctgctcggctttggcattgttcattttctaggtaccttgctgaatccactgatgcgtccattgtttcgtgttcccggaagcggtggttttgtatttgccgtgagctgtgcatccggttatcctacaggggcgaaactgaccgctcagttatgggaacaaaagctggttacccgggaagaaggagaacggctcgttgccttcactacatcatccgatccgatcttcatgattggagcggtatcggttgggttcttccataatgtcgccattgctccagtattggttgcgagccattacgctgcagcttttctggtgggtatgctcatgcgttttcacgggggtacagcaaaaggctcacagccagacatctcttctggatctccatcggaggagatacctagaaacagactggtccgggccatctatgcgatgcatgaagcaagaaaggctgacggacgggcattcggtgaactgctgcgccaggcagtctcctcatcccttcgccttattattatcgtaggagggctggttgtattcttctcggtcatgatggagttgcttgtccagaccggttggcttggcggattatacggcataaccgagcaattgttacgacatagcggacttcctccatccttatctcctagcttggtcggtgggctgtttgaagtaacgctggggaacaaagaggctgggagtgccggggcatccatcccactcgtctataaagtagcagcagcagcctttgttctctcctggggtggattatccgtccatgcacagattatgagtgttcttagcaacacacccatgagatacggtccatttctatttgccagagcaatccatgcgctaatcgcacctgtgctggtcctgctgttgtggacacccatgatggggcgttcctcttcacccgttcttatggagcccggtttcatcccatcgttatcaacgtatacaccggactggggactgattttcttatccggaatgattgtttttgtaagcctcatcgtgttgttgttattgcttgcgatattaagttccattctcaagccaagacgacatgccaaaaaataagtgaacgattcatcttatttaactgaatatgcgcccaaacgttgtgttcttccgcggaattgattatcatcggtagtataatgaccacaaaggagctttcatcttgagatactatgttcaagaccgcggagaccagttatcgattgatctcagtcagcagtttcatgcgctggcgaaggaagaagggttcaagctggatgcagaatcgccggagattgttatctccatcgggggcgatggtacgatgctacaggcatttcacaatttcatcgaccgtattccggatattgcttttgttggggttcatacaggccatctcggcttttacgccgactggaagaaggaagaattacgggagttagtcaggctgatgagtggcaagggagatccggagcgtctcaaaccacgcattgtacaatacccgctattggagcttgaaatccggaaaaagtcagggaattcctcttacatcgcccttaatgaatttacgttaaaaggtgtagacggtaccgtcgtggcccaggtcgatattaacgatgtgacatttgagatgttccgtggggatggcatctgtgtatccacaccatcaggcagtacggcatacaacaaggcccttgggggtgccatggttcatccaaccatcgaggccattcagattgcggagattgcatcgattaataaccgggtctatcggacacttggttcaccggttattttgcccaaacatcatcattgtgatattttctcccgcaaggatcaacggttactgatgaccattgatcatgtgaatgtgatggtggaggatctgatctccgtccgttgtcaggtatccagtcacaaggtcagtttcgcacgtttccgcccttatccattctggaaccgggttcgcacggcatttcttgactaaaataaacacaccaaaaaagcggtccttctcaggaaccgctttttgctttggcttgaggttgatctttgctcttctgaagcacaaagtacgcacagccaaagttacaatattcattgatataatccaccatactggcgattgtggaatcctttgtcgcttttggatggttatcacggtaaaaaccttttaaccttaactggctataaccccagtctccgattatataatcataacgctccagcacttcactgtaacgatcacggaaaacctctggattccagccttctttgtggttctggacgatttcataatttttgccgccgatctgtacaatgaccggttctttgggcttttcttcaactgactcaacaaccgattcctgagccggctcctggatctgttcctgaagttggtcctgaatctgttctgtgtttttttcttcttccaatccggtatcctccatcacgcgtgtgttgccgcctgttcagcatgtttggtagccgatttcacctgttcatgcgcatggtaggagctgcgtaccatagggccagattcgacgtggctgaatccacgttttaatccttcctgttttaatgcagcaaactcctctggcggataatacttttcaacatacagatgtttctccgatggctgcaaatattgaccaatcgtcataatatcacagttcaccgcacgaagatcatccattgttgataaaatttcattatattcctcacctacaccaagcataatacttgatttcgtagggatgttaggttgcatttctttggcacgagcaagcaattccagtgaacgtttatattttgccttggcacgcactttgtctgacaaccgctcaaccgtctcaatattgtgattcagaatgtccggtttggcatccattacaatctgcaaagattcccgatcgcccagaaaatctggaatgagtacttcaacgctacacaatggcaaccgtcgccgtacggccttcaccgtctctgcaaaaatcgtagctccaccatctttcagatcgtcacgggctacacttgtaattacgcagtgttgcagattcatctgctctgctgcttccgccacacgttctggttcctgcaaatcaagctccgttggcaagcctgtattcaccgcgcaaaaacggcatgcccttgtgcaaatatcgcccaaaatcataaaagtggccgttcgattggcccagcattcataaatattcggacaccgcgcttcctcacataccgtatgcagcgttttggaacgcatcatcgttttcatttcctgatagttatcgccggttgtcaatttgatccgaatccaatccggcttcggttctttaacacgtttagccaatgcataaaccttctttctactgaagttaggctgttgctcggaacatattataccatgaaagcgctggaaaaacccccatttgtcacatcttgtgcattcatgcccgatatggacaatttgtataattggaatcccccccaagagcttacatggataaaatgagaacttttgaagaacgctaacctttagcttggttcatcgggtaccttgtatcattctaatggaaaggggctgcatcccagtgcaacaacgcttgaccttcaggcacacgtaccgtttttggatcaaaacattacttgcaggtactctgcttctcccattcttgcctgttgaagtttacggtgaacccgcccaggccgctcccaaaccacaggctgccgagttaaaacccgcagaaattttcgctgcacgtcgccatttatatgaaaccatcggtcagatgactcagattccctggtacaggcttgccgccattgatcagtatgaacgtacgattacccgtgcacacccgaaggatcgcaagcatccggagcggcttacgggtatcttcatgacccctccggcctggagaggatggctaaatccggatgagacggatcaacatccggaatccattctttttttcaaaggatatggacgtgatggttcaggagacggtatagcggatgccaacaatgatcaggatgtgctgtacagcatggcttctgttattcaaggttacgggaacaaacaagaggacttcaacattgccttgtgggaatattatcacaactcccgtgctgtgcaacggatacagcaattcgcgaagttatatgagcattttgacaatctggatctattcagacatgcctttccggtcccgctcggaaccaactactcctatcgcagtacctgggggacaaaaagaagctggggcggttatcgcattcatgagggaacagatattttcgctccccatggcctgcctgtgcgcagtacctgttacggggtcgtggaaatcaaaggctggaatccgtttggtggctggcgcatcggaatccgtgatttgaacaatcattatcactattacgcccatctttcgggttttgacaaaagtgcacgcatcggtgaagttgtgatccccggtcaggtcgtaggttgggttggcagttcaggttacgggaaacctgggacacagggtaaattccctccacatctgcactatggaatctaccgggatagcggactgcacgaatggtcgttcgacccttatccacaactgaaacattgggaacaggatgaacgcaaacaaaagaacaagaaaagtaagtgagacgaggatatgcacgataagtattcgaaaaagggacctctttaatagaggcccctttctttgcttacaattcaaatttgtgtgtatcatgggtgcgcgtccttattgagctgtaatcccccattcatatcaggcagatcatccggttcaatttcttcaagttcattcccttgcaaatggtctgacggcgtctgttgctgattctggctagggggattcgtagttactccattaccgcttgatacacccgtatgacctgatggcagcgcaatagctggggcattactaccgttactgcccactggcttgccctgattatcgtaataatacattggcacatccccgacaaccaaaaggtaggaaatcggaatttccgtatcaaccgtttcgggttccatgtcgaagggcaccacgaccgcgacctcagcaatgatgtgaatgtacacttccaccaaaatcatgttaatacccgcattctgttgacgggtgttcagatccactttgacagcaccttggggctcaatacgaaccggtatactcgggccaaatgaagccaacaccggactgccgagcgcctgccccagcgggattttttcttttaacatgtgtacattctgcagcgtggattgcacaatattcatcgtacttgcagtgattcgcatatgctcattgtagttcagcatgaaaccggacactttcccggcggtatccgtcttccagtcaatcagtccttcgttggttttgccatcggcaacctgtgctgtaatcgccttgttgatcgcttcagttgcaatctgcttcactctaatcttggccaagtgcatgatggggggcttcatctttttatccacataagcaaagccctgcatcaaacaaaacgcggtgaccaataaaatgatcaaccacattttgcgtttgccgcttggcggcttacggcgtctccggcttcgccattttcttctcatcatcgaagtgtccctcccctacgggatgagctataggctatatgttaaccttatgcaccgttgtaccgaaaaagaaggacagcacatggacactggatagaaagtaacaacaacatgaaagggacaagtactcctcattggttaaactaacccggaaatcggaaacacataaacggagataaaaaaaacctttcacccgcagattactctgcaaggcaaaaggttttatgttcagaccacccaaagattcaggccatgtctatccttttatttcggaacagattcccagtctttcaggaaacgttcaatcccgctgtccgtcagtgggtgtttccaaagtgtcggcagaagcgaacccggaatggtagcaatatgcgcaccggaaagggctgcatcctctacatgtttgatattgcgaatgcttgctgcgataatctcggaaggcagatcatacatgtccagaataaggcgcagatcacgaatcaatttcataccatccaccgcaatatcatccaagcgaccaacgaatggactgatgtaggttgcaccggctttcgccgccatcaggccctgtgctgcggagaaaatcagcgttacattggttttgatccctttttgcgtcaactcatgacaagcgtacagcccatcttcggtcatcggcaatttaatgactacattcggtgcccattctgcaatttcataagcttccttcaacatatcctcggctttgagaccgatgacttcagcactgactgggcctttaacaacgccacagatctcctgaatgacttctttaaatacgcgaccttctttggcaatcaaagacgggttagtcgtgactccatccaccagacccagacgttcgatccgtttgatttcttccacattccctgtatccaagaaaaatttcatgatatgttccctccacttgatgaattcgtaaacacgatataagtcattacccgatgttcatcatatgttaacagttatatataaaattaatttttctctactgcatgaccgccaaattcattacgcaatgctgctaccactttacctgtgaatgtatctgtttccagggaacgataacgcatcagcaaggacaaagcgataaccggtgtagcggtttgaagatcaaatgccgtttctaccgtccaacgtccttcaccggaagagtgcattacacctttaatctcatcgaggtttgcatctttggagaaggcacgttctgtcagctccatcaaccaagagcggataacggaaccgttgttccatacgcgagccacttgttcgaagtcgaagtcaaatccacttttctccaatacgtcaaaaccttcaccgatggatgccatcataccgtactcgataccattgtgaaccattttgaggaagtgaccgctgcctgctttaccagcatacaggtagccattctccacggaagtgtctttgaatgcaggttcaacgattgcccaagcttccgggtctccaccgatcatataacatgctccattacgtgcgccttccataccgccagatgtacctgcatccatgtaatgaatgcctttaggtttcatctcttcgtagcgacgaatggattctttgtagtgggagttacccgcttcaataatgatgtcgcctttggacaacaatgggctaacttcagccaatacagcatctactacgttgtggggaaccatgatccacaatacacgtggggattcgagcgaagccaccatctctgcgtaagaagatacgccttcagcgccatattctttcatttcatttactgcttcagcgttcaggtcaaaggcaaccacttcgtgtttgtgatcaatcaggtttctacccaggttcaatcccatttttcctaatccgacaagtccaagtttcatttcaaaatcctcctgttatgaacaatgtttaatttttatttgcgttcaaaattaaaaataagtgcttaacgtttggcgaagtaaccgttccggtcacgaatcgttcttttgatcgctgttatccccagatcttttgaatctcctatataggagaaaatccggggataaaggcgaacgctttgcttctacagaatcgatttcgtcccctacactaaattctcagcgttcaagccaaccatttttaaaactgaacagctaatctatattcaaaaattttcacggccttccggccaataaccggaagggcttatgcaaaattggaacggtataattcgtaaaagatactgtgttatttcagtaatttgcaccttcgatccaactcgctttcaagtacaaagccctcaggaaataaaacatttcgttctatatcctgctaacttggaagacgcaatttggattgtgcaaaatgttcatgggtgagcagaacggattgtcctgttgtttttactattgcgttctcttatgctcactcttttgtttcacttaccaccaacgatagccgtctgctgcggtcaggcgatctgctgactctggtccttgcgaacctgcgctgtacgtatccagtggcacgctgcctgcttcgaatgcttcctgaatcggttgcacccattgccatgccagctccacttcgttccagtgagcaaagaaggtggaatctccacgcatcgcatcaaagatcagattctcgtaagcttcagggatgttacgtttacctgagttaaatgtcatatgcattggttccacttcaccatggttcaatggattcttcgcatttaattgaagcgagatgctttctcccggaccaatttcaatcgtcagcaggttcggttccgttgtattttcggattcatgacctgtcttcagtggtgctttgaattcaacaacgattcgggtggatttctcagccaggcgtttacctgtacggatataaaatggaacctcactccagaatggatcatcgatccaaagtcttgcggcaacataggtctcgttctgagatccggctggaatgccaggctcgtccagatatccaacaaccgtggaaccttgcaactcacctgctgcatattgcgcacgaacaacttcagaagcgatattttcatttgtcaacggacgaagtgcttcagcaattttttgctttttgaattgaatttcttccggtgtgcaacgttttggcaaatgcaaaccaatcatcatcagcaactgaagcatatggttttggaacatgtcacgcagggcaccactttggtcgtaataagcggcacgttcttcaacacccaccgtctcactagccgtgatctgtacattggcaatataacggttagaccacaacgcctgaatcaccggatttgcataggtgagcgtctcaatattttgaaccatcggtttaccgaggaaatggtcaatgcgatagatttcttcttccgcaaaggtattgctcagtttttcgttcagatcacgagctgattgcaggtcgtgtccgaatggtttttcgataatcagtttcttccagcctttggtgttacccaggccactttcttgaatgttcaatgcgattggctcaaagaattccggtgccaccgacatgtagaacatgcggttttcgggaatgttaagctcttgttcacgctgttgaaccagttccaacaatttggtgtaatcttcaagcttcgtattatttaaagaacaataacggaaagctccaatgaaatcacgaacctgagatgcttcttccggcgtctgacgtgagaattcatgcagtgacttttcaacattcgcctggaagtccgtatccgacaattcacgccgtcccaatccgataacggagaaggatttcggcattttctgatccatgtacaagttatataatgcagggtaaatcttgcgtttggctaaatcgcctgttgccccgaacaggacaaatgtcattgcatccattggagtgcctcctgtgatctgtgcagtatagtatatgatgttgcaaaatgttcaaatccaagcatgacaaaagacggaataagtgggtgtggtccccgccttgcctccgtttatataacgcacctgaattcaaccatggaacattccttctctccacaacctgtgtttaggttataaattgtaaccatttgaattaacgttacccatattacacctgtcgtcacaattcgtcaataatcgtgtcgaacctgtgaactccagtgtttatagggtttttatttgatgataacgctttatgtggtaacattaagaacaattggtatgtgacattttacacatatggcctgtggacaagtaggttacaataagtatactaatgatattacaagcaatactaaaccaaaggagtacaatcatgagcgatgatgagaatgccaagcaaatatgtacaaaagtggaacaatcttatcagatcattggccgaaaatgggtagccctcattatccatgcgttgatggaggaacccaaacgcttcagtgagattcacgcttatatccctgacttgagcaaacgtgtgttaaatgagcgaatgaaggaactggaggaagaaggacttgtggttcgccatgtggtcacggaacgtccagttcgaactgaatatatgttgtcacgaaaaggaacggaactggggagagcgctaagctccgtggaacgttgggctgataagtggttgtaacagcttgaggaatccacaaatgtttatttagcttgaagattaccgatgtgcatcccggaggtggagtaaggcatttagcaactggctagtgcaatccacagccgggatttatttaatttaaacggtaaatactaaatgtgtatagagacgtaataacgctatttctcacaattcaaaataacgcttactgcaccgttcaaattgttgcccatactgcattgggatcgtcccagtagttttgcgaaataaatgtatgaaatacggtccatttggaaacctgcacgtctgtcaatctcctccacccaaagtgatgttatctcaaggagtggtaatcctgcttcaacctctggactgtgatgtagttcgtaatgttgctatctatctcttgatgaaaaatgcgggaagcatacgatttggacaggtgaacatctgccgccatcttgcccaatctgatctcataatccaatccaccacatcatcttctccaagtgtctaaaatgacgtgaatccgctaactgtgaaagcgctacatttgcaccctctttctgttgaaccaacacgctcaaaagctgaagctaaacagcactgattcttcctattctccctcacacgactacgagactgattgtagctctcattgatccaatccctgactatgtagattatgatcttgaagcgaatacgagttacatagatggaaaaaccgggtgtattaattttttatcgtgaggtaggtgtaatggatctagtacaaaaaaagatgcccattctcacttatgtgaggagcatcttttcacgtaaaatactatgaatccatcttactcccgagtgtaatactcgaatcctcgaagttgtccaccgtcgtctttttttcataaaagtgtacggcatgttgcataattccttctcttgtgtaaaactcatcttccgcccctagtggaaaaacaaccttttctcccgtacttgccgacttatagatacccacaatcagttcgagtgtattccgaccactttggccatccaccagaaggggagatcctgtctcaatagcatttaacacattctcaacttgcccagcgtgaccgacatgaataacatctggtaattcgtcggcgagcttctgaatctggtgttccaactctcgattcggttccggaaatccgttattccgcgcggtagaagcaacgactttccaaggtgcagatacccgggcttctttgccctgaaaaattaactgctgctcctctccgtgatgtacgacggaactggtaatcatgccaagcgccccttcctggaagcgaagcatcgccatggatatatcctcaacttcggcattatcatgtgccgtatttgccatcatcgcctgtagttccactggaggtcccatcatccagagcatggcatcaatatgatgcaccgcatgattaagggtacagcctccgccttctttttcccatgtcccgcgccaccacagatcataataattgtggccacgccaccagaacgaatcaacctgcacatgtacaatcggtcccatccgtttactgtccagcacaccttttaacttcatcattggtgtcgtaaaacgattctgtgctactacggataacaacttgccacttgcttgcgatgctctcaacatcagatccgcttcctccagggaagaagccatcggtttttcaaccaacacatgtgcacctgcttgcatgaagtcacacgcaatgggagcatgcgtatacggtggtgtacagactgataccagatcaatgttttgggcaagtaactctgtgtaatccgtgacagcttgtgcaccttccagaccatattcattaattcgcttctgtgctttttccacgtagatatcgaccacagcaacaatctgacatcgctcagggaacgccatatatgctgagatatgtgctccactaattgcacctgctccgataatagccacttttaacatcgttgcatacctcccttattcccttcacaatacacaataataaagcgcttttatgcgttcatcttgtgctaaaataaaactatcttgcgcatgataagggaggcattcatgaagtccatctttctgggagaacaatttaatctggtctgtcgtcgtacatccaacactacgtctcgcgaagtgttccatgctcattcgcagctggagataacctatattcacgaaggatatgggcagttgataaccgaaggtcaggttttctcccttgaacccggtatgctcatgatttttcgaccttttcaattgcaccacatccagattcaagtatccagacagcagcctttcattcgaaatgtactcatggttgaacttgatctactgaaggcacattggccccaatttatcgttactcacgacttcatacaggatctgctggaagagcaatcccccattcagcccatccgacttgctgccacatccccactcgttgaacgaatggaacaatatgcagattcgtatccaggtctgctacctcacgaagtagaggaggatacacgcctctttttattggatctgctcgtacaacttcgctatctttggcgggaggggcagcaacaccgctcccaagatgtactctcgtccagtgcaaacgttcttcaccctcatgccgaagccatcatgcaatggattgaacagcattaccatgagccttttcgtttgggggatatcgcagatacacttcatttatctccctatcatctgtctcatgttttcaaaaaagcgaccggaaccacaatcgttgcttatgctcaagccacccgcattcgtcatgcctgtgtgctgctcactcggtcctcgctcaccgttcccgaaatcggtcaccgtgtcggtatgaccagcccctcttacttttgcaaattattccgttctaccacaggctctacaccacatcaatatcggctgaaggtgcaggggaggaagtaatggatcacaacaacaagaaagaagcgaaagaattcacttctccgcttctgctcctcttcacagttcacccgattcaacgcacattgagctccaaccgtttcaaatagggaattaggcgtctctctagctgccttaaatcatccttctgttccgctgacaatcgttcctcatgggtacttccatccttgtccatcaccataactttgtattttttcatttgttcatagacagacttgaactcacgatattgttccttggtgaatgtcttctctgcctgttccaactgttccgtccaaaattgctgctcgtccatcagttttttggaggaccctacactcacagcttccagcttctcaaaaaacggttccaactcagctacaagaaggttatatcgttcctgctccactgtactccactgctctggatgcatattgccctgagaatcggcatacttcacggccatttgccctaattgcttcagcaagtccatatattgaacaaattcttcttcgctgaaatgggccttggccgtctgcagctttgcttccaacctcatataatcctcagctgttccccccatagctttgatattctcctgcgaaccatatattccgtctgcgagataggtgtatcctgcgtaggctccggtgggaataatgagcacaacagctaatagtccagtgatcagccatttttttcgatttcttctgatgtgcgaattacttcgaataccatccatcattttatgtttaatcctcgtaggaacggaccagtctttggtctcttcctggtaggctgttcgcaactgttcatcgagtttcatgcagatcctccacctttccccgcaaccttggattcatcttctctttctgtcttaacttcgccagcgccgcatgtatgcgcgattttacggttccaagcggaatctccaatatgccagcaatctcctcttgcgtgtattcattcaaataatgaagtgtaaccacctgctgcagcttgtacggcaaacggtgcacctgttccagcagaggacgatttgccagtttgttgaccagatcagtggaaaaatcatattccataccaacgtcagatttctcgatccgcttgccaaaacgaaactgcatcaatcttttgcgtcgataactctgaacctgtcgcatcgtcacccccattaaccagggacgaaaagcacgctccgcatcatatctcgccaatgaccgatacgcctgaatgtaaatctcctgtacgacatcctccgcgtcagacttgtccttgatgagaaatcgcacagtttgatatatcctcgtcactgttttctcatataattctccatatgcttcttcatgccccgtccgtattaacgttacaagttctatgtactcatcttgttcactcattatccattcccctcctccttacactatatattggcatgccagcatcatatcgttcgatttatttattgaatgagtaggtatggctgaatctgatacaaaaaggtcctctggtgtttatcatgatataatataactaattttgatataattggaggtttttcgtctgagttataagatccgcctttggtcttttgatattatcttatttcgatcatcggatttgtaatcgccagaagtaacctcgaggcctacgccacggtatacagacttattgggatcttggttatcttatcgtctctttttctttcgaaagcggatataagggagtaacttagcaggggtggtcactactgtaatgaaacttttcagcaaattgtactcagaatatctcctgattccacgacctttacgtttgttgtttctatggggatggattgttttgttttttgttgctggtaccaaattcagatggttctacttcctacaataagctgattcaaagaagtctgatcccctgggacatcaaaaaagagctgagtcgtcatcatgacgtctcggctcttctttgatcatcctcttccttgcagataaagatataggtaatcaactcgagctcgcctatacgttcctttttgaggcaaactttatttggtattcagaaattcatatcacttgatcaccgctcctaaatatgtctacctgttcaagtcttgccagtacgttggcaaggctttttctcttaaacataagttgtttggctttgcttatgtattctttagattttcttcagatttatactcattaattccttagtttttttcattaagattgctatatcaacaagagaggaggcaaaacaatgatcagtaatacgatcttagagctacttcatcagtatggttatctgattttttattttgccttctcattagggcctttcgggattccaattccaaatgaaatcacgattatcagcggtgccattttgagtcacacgggggttatcaattcatggatcacatacttctgtattttatcaggactattaacagccattacctttgcctattttgcagggaggttatttggaaccaagataaaacacagatttcaacatcataaacacttcgtcaaggccgaactgattctgaataaaagtggcaattgggcaatgtgcatcggtttgttcattccaatcgtgcgatatgttctccctttggtcattggactgagcggcgtgcagtatagaaaatttgctctcatctcctattccagtgctttgttatggaccataacgtattttatagcgggaatttacttcggtggccccatactatctacgcttcatttattacatttctaactggtttgaataacataccatcacattatggaggaacccctatgaattccaatgaacctgttttatttttgaaaagttttctgcaaagccctaaacatgttggcagtatcatacccagttcccggtttctcgccagcaaaatggtgaagcaagcctcttggctagaggcaaaagcagtcgccgagcttggatcgggtacaggtcctatcactcgttatattcatcaacaagtacaggattccaccaaagtcctattgtttgagatgaacgaaacgatgaggaatactcttaagacgacatacccggagttctcctgttatgcagacgccgctcgattggtagaatccatgaatcaagagggcattcagcaactggattacatttttagcggattgccgtttttcaactttgagcctgaattaagaaatacgttggtagaccagatctataaggcactcaaacctggaggattattcatcgcctttcaatattcacttcaaatgaaaaaaacattatccgaacactttatcatcgaaaaaatagaattcgtgcctttgaatataccttctgcgttcgtttatgtctgtcgcaaaaaggaaacaatttaaacattccggactatcgtttacactgatgttatccaaatttttaaggagtgttcaattatgaataccgttcttgttgttgatgatgaacccgatatccgggatgtcattcatgtctatttacgtaacgaaggatatcatgtcatagaagcagccaatggtgaggaagcgctaaatattatcaaaacaacatcggtccaactcgtaatactggatgtcatgatgcccattatggatggaatcaaagcctgcttcaaaataagagaagtatcacccactcccattattatgttatccgctaaggaagaagacattgataaaatcactggcctgactaccggggccgatgattacatggtcaaaccgtttaatccattagagttacttgctcgcgttaaagctcagttacgacgtcaaaccctgatcgggaaaccagaatccaattcacttattttgatcaaggaccttgtcattgatacaagtaaacattctgtgaagctcaaagaaaaggacatttcgcttacaccactagagttttccattctggtgctgcttgccagccatcctggacaagtatttagctccgagaaaatttacgaaaccgtatggaaggaaccttacgggtattcggataatacggtgatggttcatattcgtaacctgcgagagaaattggaagtaaatccgcgggaacctcattacattaaaacggtatggggagtgggatataaaattgattaaacgattaccacattttaaaaaaaagatacagattaacatcctatatcaaatgttgatcagtttattgatttcgtttgttggctctgtgggtgtcaataatatgttgatcatagctgccgcaaaaattagtgaaagatttaattggccttcgctcctctacatttttccttatgttctaacaccaatcttcatcgtaattttcacgttgatttttttgttttccacacgaaaaattgtgagagatcttattacattagagcaagggcttcagatcatatccgaaggaaatctgaattacagggtgcccgttaatcgacaagatgaacttggacgcgttgcttccaacatcaatcatatgacagaacagttaaagcaacagattgctaaagaacgtgaattggagcaatccaagatggacatgatcactggcatctcacatgatctgcgtacaccgcttaccagcataattggctatattgagcttctcaaatcagaatcatttcaagacaaagcagagtatgatcgtttcatccaaaatacctataacaaagcaacgcatttgaagaagttacttgatgatttatttgaatatacgcgtcttaacgaagtgaacacccaattggatttaaaaaatgttgacctctgtcagctattggaccaattgttgtttgaattcgaacctttagctcaggagcatgggattcgtattgaaaaaacactcggtaatgctccaatcatggtttccctggatagtgataagatcgctcgagccatcgacaatctcctcatgaatgcactcaagtattcctttaaaccgggcacgattcatgttcgaatgagtgggcagcataatcacgttaccattgaagtagagaataaaggcataccactaacgttagaacaaaaaaacagactgtttgatcgcttttataaggtggattattcgaggaatagcgaaggtattcaatcaggatctggtctgggactttctattgcgagaaacattgcggatttacatcaggggactttaacactaaaacatacgcgtaacgtatttatattccaactaagcttgccttctaacatccagtgaaacatcaatagcattgataatggaggataccgcgatgaaaacatccgaaccacttcttttcctgcaaggatttctgagaaaccccaaacgagtaggcagcatcctccccagctccaaatatttggctaagaaaattgtccagtctgtacgatgggatgaggtaagaaccattgctgagctggggccaggaacaggggccgtcacacgtctcatgagagcacatttaccgaaatctgcaaccgtgtttttatttgaaagagaccccaaaatgagaagtaatctgaagaaaacatattctgaattcatgttccattccaatgcatcctatctattaaaaaggatcaatcaagaatatatccatcagttggatagcatcatttgcggactgcccttttttaatttttccagagaaatgagacaaaacatcatgtcacagatccatacagcgctccgacctggaggcacgttagttttataccagtactcccttcatatgaggaaacaattagctgagttatttgagatggagaaaattcaatttgtgcccttcagcttccctcctgtttttgtgtatgtttgtcgtaaaagacaagatgatgaacaacgtgaagcgatcgacttgaggaagacttgatttatcctctttatatgtttaatgtcctgtcttgtcctgtgaggatctaattatgcgagtcatcatcttacgcggcaacaaccgcggcataaacgcgatgaatcgatttcgagcaccaggcataattaatgtcttgccacgcaaaaagccttgatacccttcttcggccacctgtccggcttccatgatcgggccctgcaacatcttcgagacacccatacccgaacgatccacaaacccggtggatgtcaggcctggacacagtgccgttaccgtaacgcccgttccgcttacttcattctccaaagcctcggtgaatgatagcacgtatgcctttgttgcataatataccgacatcatcggtccagggaaaaaacctaccaatgaagccacattcatcacaccgccttgcccacgttggatcatatccggcaagaatagctttgtcatgacggttaaagccttgatattcacgtcaatcatattaacttcttgttccatatctgtttccataaacgtcccgaacagaccgaaacctgcattgttgacaagatagtcaacaacaatgcccttttccttcagctcatgataaatctcctgtggtaccccaggtgccgctacatctttggcaataaccgtcgcctgaatgccatactttttccgatactcctgagctagatcctgtattttaccctcacttcgtgctaccagcacaatatgatgtccacctttggcaaaccgatcagctaactctttaccgatcccacccgatacccctgtgattagaactgtctttctcatatcgtgacctgcctctcttttctataaaatatgtttcatctggaacatcaattagaatgaacattctataatagtaacaaatagactaccttagtatgagatccatggatagcatcgctatacgaagcagtttttccttggtcatcgaagtcttggccatcccccttaacccaatgcttacgttatgcagatattccgccaatacctcggcgttgtactccgttgtgaattcaccttcttgctgtccccacaccataatgtccttgatcagtttctccgtatttgcaaacatctccgtcgatcggtggttcatgtctttatcacgtgccgccaattctaccgtcgaattaacaatgaagcaacctgatgctggagattcctctccatgaattaaagaaagaaatataaactgaagtgcttccgttgccgttttagaacgctttacgcctgctgcaagagcggagctgattttgtgatcatacagatctactgactttagaaacaaggtatgtttgtcaccaaatgtgtcatacaagcttttacgatgaattcccatatgattaaccagatccgtcatagacgtcttctcataaccttgttcccaaaaaagtctcatcgctttatccagtacaacagactcttcgaactctttgcttctcgccattggctttcctcctgttcagaaaacgaacattgaatagcataagcatgatcctatcgagcctttaaaaggtaacaatgactttgccctgagagtgacccgtggacactttaatcaatgccttttcaatgtcatcaaacgtatacgtagaatcgatcgaaggtttaatgtcttctttctctacaagagctgtaatctcttgcaattgaactccactggagtgcacgaataaaaaacgatattcattttgattcttacgcgctaaagaatccaggcgtgcacctacgagaccgaacaatgctcttttccacaacgggaattgactgtccactgcaaagcgataattgggtcctgccttcaaagaaactaatttgccatgtggtttcaaaatgctcagttcagctttgatctcatccgcacccaaggtgtcgatcacataatcgatatcggacagaatgtcagcatactgctcagtcttataatcaatgaattgatctgctccaatggatagagtacgtgctctgcccctctcactgccacttgtaataaccgttaatcccatggacttggcaattgggatagccatcgcaccgaatcccccggttccgccaggaataaacaactttttattcggttccgctcggagcacatcatgcaatgcttgatacgcggtcaaggcagtcaggggtacagcagcagcttcgataaaagacagattttcaggcataatggataaagcatcctcatgtacagccgcatattcagcaaaagcaccaattttatttagtggcaacctcgtataaaccgaatcccccactttaaaattcaaaacatcatcaccgacagcttcaatgacacccgataattcattccctaaagttaaaggtaacgtatagtcggcaatcatccgaacactgccattcatattcaagatatccagtggatttacacccgcagctttcactttgacaaggacctcatggctctgaatctgaggtgtcgcaatatcattaatttccacctggatttttttagagtatttctgtatttgagccgctctcatcatttatcctcttcctttgcttatagactatataagttgaactaaagattatttacactgatactacgatgacagaacaaccttccaatcgctgttatccccaggtttttttgatcccctttctaaagggaaaatccggtgataaaggcgaggtgtatgcttccgaagtagctttctttcagaaagcttttagcttcgctttttcaggttctttctgtcctctccgttaatgtgtaaatgattagttcaacttatgtagtaacatggcgcgcagtattcagttgtacgccatgctccatgctttgtgctagtgtagcccctcttgcgactttaattcttccaacgtagggtaatccgtgtagcccttacttcccaaaccaaagaatgttgtcggatctgcttcattgagtggcgcaccttgttgaagtcgttccaccaaatctggattagccaaggaccatacacctacaggtaccacatcagcgagaccacgatctaaatcgacactaagatcctccaacgttcttccagcccgattgaccaacaatggattttgccagatcgaacgaatgtcttggagcagttgttcatctccaagatgcataacatgaaggtaagccaaatccaattgagccaattcttctacaagatagcgatagagttcaggaccttgttcgccatcttgaattccacccagcggtgtccctggtgagatacggaagcctgttcgttctgcccctatttcctccacgatggctttggttacttcaatcgcaaagcgagtacgattttcaatagacccgccatactcacctgtccgtgtatttgaattttctcccaagaattgattgatcaagtatccattggccccatgaatctcaacgccatccgcccctgcttcgatcgctgcggctgctgcttttcggaaatcggcaatggtcgtttgaatatcctcctgactcaattcccggggaacggggatatcctgcatccctgtagccgtaaacatttctacacccggtgcgattgctgatggagcaaccggttgacgatgatgcggggtattgtccgggtgtgacatgcgacccgcatgcattaattggatgtatacatatccgccagcttcatgcaccgcatccattacctttttccatccatcaatatgcttatcggtgtagatgccaggtgaccacaagtatccctgtccatcatcggaaggttgcgttccttccgtaatcagaagtcccatcgttgcgcgctgagcataataaagtgccgccaactctccaggtgtaccatcttcttgtgctcgactgcgtgtcataggtgccatcgctagtcgatgaggcaattccatgttgccaatctttgttttactccatatcttttccaatgggatgtactcctcttcttatttgagattttgtagatgaatcctctagattctgttctattaattcaactctgaaatcaccgggtagattgcgcctgtcagttggaactcatagttctggtctacaattcccacgaccacttcattgtgatcatacagatcgatcatgaagcctgccatttctttagctgtgtgatatttgggcatattcgctttgtaatcaaatccttcagcatctattgatttttgcacaaattctgtttccgtgaccgctggtgcaagcaccttcgcttttagttttgcacccttcaattccagttctttggcaaggccctctgtgaaggcactaacgtagtatttcgatgcagagtaagcaacactgcctacagcaatggcatatccaagtgcggatgagacgttaatcaattgagtgccttccacattcgcataatctcgcacatacagtgtagatagaatggtcaaagattctatgttaacacgcagcatggtctccactttatccaaattctgttcagcaatgaacgagccttctccaagccctgcattattgatccaagtctcaatttcatattccttcaaatcgttatacagttcgtacgcctctgcggtaacagacaggtcacttgtgtgaacgacgacattcactttaggatcgataccctggatagtcgatttaagctcctccaacttatccaatcttctagctaccaaaatcaagtttttgccccgtgctgcaaatgccaatgctgtttcatatccaattcctgaacttgctcctgtaatcactgtgtatttcatcatattctctcccttatattctttagattagtgtaattccagttttaagaacgatcgttcttaaaactggaaaaaaaagtagttagatctaacttgctgttagcatatcatttctagaacgaacagtaaagaattattttatatatagaaaatatgcttggaacatacttaaataagaataaaatcacgctatataaaccattttttatatcataaattaagaattcctatatcgttttataagttctttcattgaataatctaatgtcaggccgctggccataagtataaccatcaacctttcctagctacgctaatctgaattcgacatcatccatgccagaaattctccaaacgaatcggataccttttcaacctcttcaaattcaggctcacatccacggacaatagctccactgtccgttgttaagtcaatggcatagaaggaatatccatcttccacagacattacgatcggcaagtgatgatcccaccaagccgttatctctgactgccaaatagaatcaccctctgctgcctccaaactaagcatttcaaattcattccattggaatgcggtctccgtgctattgttgaactcagcctcacaaataaaccaggtttgctcatccggtgcaacgcatttttcaactacatttagaaattctaaatattcatctggaagtcctttatatcttgaagtaacgttgctgtttaaatgtgactgcgaaccggatttactcattatgtcccagcccttttccccggcccaagccataaatgccctaaggtgagttttttcttttccattattcatttccaatttatacacctgcctatcagcttaagaaatagaaactatatcacctattcgggatttgaatggaaaatccctgctgtcgtgcttcaaagagaaaaacaaaaagactggaaacatggttgggaaaagcggcaaccaggttccagcctttggtggtttggggacagttaattttagttagggacagttaattgggaaatggacaggaattattagttagttaaatatcctgtaaaaaactaaaaataactgtccccacctccaaatcccccaatcccttaccccacaatgcttcaccgccatttccgagataaaaataactgtcccaaaaacggagaaatacacctgaaaactggaagagaactggttcaattgtgaacgaaaacaactaataattcgtgtccctgaaggggtagagatgtgcctgagaaaagcaagcatcggcagttataaaggctgggtaagagcctgggaaatgcctgagtaaaaccgtctctgcttaccctaaaaccttgagtagactgggtttctgcttgattacctattcgggatttgcgtgaaaaatccctgctgtgatgctttaagagaagagaaaaagactgggaaaatgggtgaggaaaagcggcaaccaggttccagtctttggtggtttggggacagttaattttagttagagacagttaattgggaaatggacaggaattttttagttattaaatatccgctgtctcatcgcctcaaacaacaaaatcgttgccgccattgccgcgttgagcgactctgcctgtccctgcatcgggatcgtaatcgcatcatctaccaaacgtgccgtagcatccgaaatgcctttgccttcgttaccaatcacaagccataccgactgcgtaaaatcatagctataacatgaatgctctgcctgcaaagaagtactgaccagcttcacgcccgcagccttcgcttcgggaagcaaggattccaactggccctccacaatgggcaaatgaaacaatgaccccatcgtcgaacgaatcgtctttgggttatacacatcagcacagcccgcgccaagtacgaccccagcggctccagctgcgtccgcactacggatgatcgtccccacattacccgggtcttgaactccgtccagcacaacgacaagcccacgtgctcctgcgatcaggctttccagtggctcactgcctttacgcacaatcgcgaatacaggctgtggcgtcatcgtatccgtacatttggcgataaccgcaggagatacactaacccactccacacgctgaagcgggttttcaagcccggcaagctcattcggtacgccttgctctccatcgtacacaatacactccagatctgctccggcgcgcaatgcttcctgtaccagatgaatgccctcaatgatatatttatgttgacgggtacgatgctttttctccagcaactgcgcccattcttttacacgtgtattttgcggtgatacaatatccatctttccatccttcccatctgcatccatcacttcggatacgcaagctccattttcgtcaaatgatccttgtgacccacaatgatcagcacatctccagcttcgatccgatcctcagcgtacggcgagatgttcatcgagttcccactgcggatcgccatcacgttacaaccaaaacgtgcacggatgtttaattccatcaggtttttaccgatcatttgctcggaggctctcatctccaaaatgctgtaatcctcagataactcgatgtaatccagtatattaggcgaggtcagatgatgggctacgcgcagtcccatatcccgctcaggatagatgactttatccgccccaatcttctgcaataccttaccatgaagctcattttgggcttttacgatcagaacgggtacacccatatctttcaatatcagggttgtcagaatactcgcctgtatatcttcaccaatcgccacaacgacaacgtcgaaattccgtatgcccagcgcacgcagcgcttcttcatctgttgaatctgccgataccgcatgggtcaccacattggacatttcctgagtccgctgctcgtccgcatcaattgccagcacgtcgaatcccatgccactcagtgcattggcaacacttgatccgaatcgtcccataccaattacggcatactgtttcttggccattagggtcttaacctcccgctgctcttcagcatgacgcatcattacggatacccatgctaacgtaaataatccttcgtagtataccacaaagcccgataaacttgaatgcgctcgcgcttcccagggaacagtattagagcagccgaatatacgaggagggaattgcgatgcccattacattaagcctgcgtgaagcgattgttcataaagttcatgacaagagtgatgatcagctccgggagatgattgaaggttcagtagatggaccggaagctgcattacctggacttggcgccattttcgagatgatctggaagaacacagaacctgccaagcaggaagaactcattcaaatcgcgcaggagcatctgcacaccattcccgttcaaccgcttcgctaagtgaagcattggagggtaaggtaaccatcattacgtttgttctgtctgcaaaagaaagctttcccttattcggctggatcatacccgcctccaggtaaggtgtatagcaatagatccctccgccaattggcggagggatcttatttttaacaagctctatctcatcacatgagcttgtcacgtttaactaatttcttaacaattcccacgaaatacttttgtcttcacttaaggcgcagtctccaggaattgagctgtaggatttttatccatagccgttctcattgcgtactcattttcgaagagcactacataatttccttttttatcttttacaagcgcagagttaatccggaatttgcttgggtccagattctcgtccacgatccagcgagcgaactgataaggcatgcgttgtaatagtacgtctaccccatactcgcctttcatccggtattcaaatacctcgaactgaagttgaccaattacgccgaggatagtctcgtcgaaacttgccgtctggaacacctgaatggttccttcctccgtcaactgatcaattcccttttggtactgtttatgtttcaatgcattttttacggtaactttggcgaaaatctctggtgagaacgttggcaactcctcaaagacaatctcgctgccttggctcagtgaatcgccaatccggaagatacctggatcgaacaaaccgataatatcgccagcatatgcctcttcgacaatatcccggtcttgtgccaggaattgctgtggctgtgacagcttgatttctttgcccacacgagtatgcttcacactcattccacgttggaacttgcctgacacaatacgcaggaacgcaatacgatcccggtgtgccgggttcatgtttgcctgaatcttgaacacataaccgctgaatttctcatttgttggctgaatctctcctgccgtactacgacgtggttcaggcttcggtgccagttccaggaagttctccaggaaagtctgtacgccgaaattgttaatcgcactaccgaagaaaataggtgtcaattcgccgcgttgaactttctccatgtcgaattggtcgcccgcaatatccagcaactccagatcctgacacaattgatcatgcaggtattctcctgccatctcacggataatcggatctttgtagccatctaccttttgtactttgatcgttgagtgatcgtccccttggaacaattccacctgatttttcatccggtcgtagacaccgcacagctcgcgacctgtaccaataggccagttcatcggaaccgaacgaatacccagtacattttcaagctcttccatcaggtcaaatgggcttttaccctcacggtcgagtttgttgatgaacgtaaagattggaatgccacgcttcgcacatacctggaacaacttgatcgtttgtgcctcgacaccttttgccacgtcaatcaacattaccgcgctatcggcagccgtcagtgtacgatacgtatcctcactgaaatcctggtgacccggtgtatccaaaatgttgacgcgatgatccagataatcaaattgcattacggaagaggtaaccgagatcccccgttgtttctcaatttccatccagtcacttgttgcgtgtttgctggctttccgagcttttaccgttcccgcaaggcgaatcgcgcccccgaacagcaacagtttctcggtcaatgtagttttacccgcatccgggtgagagataatggcaaacgtccggcgtttgtccacttcctgttgaagaatttcatttgcagctttgctcataggtttaatccctttcgtccgttcattcacgttaatccggcatggccggtccatcattcaatctttatgcaatccggcgaggccggttgattgtacacgagtttttacgtactaggtatttacacactagattaattttacacatttacaatggagttcatcctcctcaaatctgtgctttcatgtataccgtgaactgcttcttaacccaactctcctattgtaccataatctgtaccgaaaataaccgattactaccgcagattcttctcttttcacttgcaaaaaaaaaagcacccttcagccgtttccatggcatccaggcactcctcattcatttttatttatcggttttagaaaatcaatgcatcaagcgcatattgtccgccacctgtcaatgccagcgctacaccaatcaccagaatcgcgagattatattcgaatccgttctgggtggaccagtatccgttcgcgccatggactttcacaatcgcaatgaccatcgtcaatgcaatcagaatgccacctaccggtgtgagcagacctagagccaacagcaatccgccaccgaattccgcgagtccagccagtaacgccaccaatgcacctggcttcatgcccatcgactcaaaccagccgcctgtacccttgatcccgtaacctccgaaccaaccaaacagcttttgagctccgtgcgccatgaacgacaatccaatcaccaaacgaatcaacaacaaccctacatccaacatcattttctttttcctccattcgatatatacaaaatagtattcttagattaaagatattatgcacattttttcttcatgattctctgtgacgcaaaccccttcaactggtttacattttatctcatgaatgatcacttatccgaaacgtttgcccgaatgaagtttgtcatttgcgtaactctttaactcatgtgttgagtataagttacatacttactttttgtcaacaacttaatttaaattacttatttccttaggatggatacctaccttttctcccactaaaaagcctgggtacaccgcaaaatttgcgatttccccaggctcagtcatgttgtgtatgttgttaatactgttgttaatgcccttaccctaccctaaccattcacttgccagatcacgctgtcctcgtcctgaccgttcaccggccaccagtggaatccgtcctgctccagcagcttatctgtcgcttctggtccccaagttccagcagggtacgtatgaagctctccttgattctgcccccaggctgctgcaatccgatccacaaaggaccaggctgttgccacttcatcccaacgggtaaagtacgtagaatcgccctctgctgcgtcgtgtatcagacgttcatacgcttcaggcgagttaattccaatcatgcagctctgacagaaatccattgcgagtggctgaatctcggaatccgagcctggtttcttggcattgattttgatatatatgccttccatcggattcacccgaatgactagcagattcggttccaatttatactttttcccaaggtacacgttgtttggcatcgacttgaattcaactacgatctcggtcgtttttaccggcagacgtttgcctgtccgaatatagaatggcacacccgcccagcggaaattatccacgaatacacgtgctgcaaaataagtttccgtattcgactgcggatcaaccttgtcttcctggcgataccccggaagctgcttgccacggtactccccttcggcatactgcccccgcacaacgttgttgctcacttcctcatccgaagtaaaggctcgcaatgaacgcaataccttcaccttctcatcccgaatgtcctccgggaataggcgactcggcggttccatcgcaatcattgtcagcatctgaagcatatggttttgccccatatcacggagtgctccggagtgatcataataaccgccacgttcttccacgcctaccgtctcaccaagcgtaatctgaacgttggcaatatgtttgttgttccagagcggttcaaaaaaagcatttccgaagcggatcacttcgatattttgcaccatttccttgcccagataatgatcaatccgatagatttcctcttcacggaatacctcacgaatctgctcattcagatgttcggccgattgcagatcataaccaaatggtttttcgatcaccaaacggttccatccctgactttccaacataccaccgtcccgcaaactgtacgagacactgccaaacagctcaggtgccagtgccagatagaacagtcgattccccggcgtgttaaactttgattccagatgctccgtctgcgcacgcagctctttgaatccttccacattattgatatccagtgctttgtattcaaaatgatcgacaaaagcgttccactcatcaggttcccccgctggataacggcagaactctttaatggattcatagatgtcttcccggaattcttctggggacctcggacgacgtgctacgccaataaccgcaaagtcttcggcaagcttgccttcacggtaaagactgtagatagccggaaacagcttccggcgggccaaatcacccgttgctccaaaaatgaaaaatactgcgcctggtgtctgtacttcatcttgcaattgtttttcaaccatgggctcctctttcttccgggaagataaccttcacgctctccccgagctatgtaatggtgttatatatgcacgacatacaactgtcaattaccagcaagttccttcttggatgtgatgccattttagcatatcaactgaatggatgcactatttcaaactcatttttctgataaagattctcaatattgggtcccaattcatgaaaaatccatcccttagtattcaatcgtaatcaccggaaaccccactgtaattcgattatcgacctcgtccccaacctggtgaactgcgagttgcatattcaacatgtgcgagccactcttgatcgacaagggcagctcggccgcctcataagagacacttgcgctggctacatccgtatatcgttcaacggaggcgatatccacctttgtggacagctgttcttcgatcagttccagttgctgactcgcatcatgttcaatagcagtaactgctgtaccttgcacagacatattccaggttgccttcatccctgagtctacaagcagttgaccgatctcttcatgtaatgtcattaatgccttccgatccgtgtgtgcatcccctgagagttgtacaatggcatagtaaccattgtctcctgtatcgacgacattgaccaacatgcctgcacctccagtagccgtatcgacaatctcttcactgcggtaaacatcatgacccgtctggcttacccgcacaggtggttcaagtcccaagtgacttgccagtaacacggcctgcgcttgtgcatctcccttgccttctccttgccatttaataactagacgatccacattatcaatcacactgtcagcagtatagattaactgttccagttgggtagctttggattcgttcttctctgcgtatacctgtgtcacaccaataagaattatgataactattgccaagatacctgctgtcatccatcgatttaacatttgaatcccccgcttctttcttgcattctatgaatctatcaacagcatgcccctttcgcatatttgctatacttcttctgcacacaacaaaaaagccccacccgccacttgcatggcagatcagagctttccattcatcttttctatataaattgaactacacaatatttacactcgccactccgatgacagaacaaccttctgatcgctgttatccccagattttttgattccctttttcaaggtaaaaatccggggataaaggcgaagtttatgcttccgaagtagctttctttcagaaagcttttagcttcgcttcttcaggttccttctgtcctctccgttttgtgtaaatctttaattcaatttatataaatcatctcttatctataacttccgcacatgaaagcacggttctttggcttaattatggatagtacatatgattcttcttactctgcaagtccgtttttataagcatagatcgcagcctgtgtacggtcgtctacgcccaattttgccagtaagtttgtaacatggaatttgaccgtcttaatgccgatgattagatcatcagcgatgtcctgattcgatttacctttggcgagcaaccggagcacatccatttctcggtcagtcaattcatcatgcaaaggagctgctgcctgtggctgccggaagcgattcatcattttcgaagccacctgtgactccagaacggattgcccgcgagctgctgcgcgaatcgcatctgccacttcattggctcttgatgttttcaacagataactgaatgcgcctgcttcaatgacaggatacattttttcatcatccaagtaactggtcaatacaatgactttgcactctggatacattttaagtacctgacgagtagcctcaatgccgtccattccttccataaccaggtccatcagaacaacatcaggcttatattcctgtgcaagccgaatgccttcctctccactacctgcttcaccaacaacttcaattccatcttcggtatccagtaccgctgcaagaccaatacgtaccatctcatgatcatccacgagcaatactttgatcgacgtttccgtctccgtttcgacttccggttccattgacatgttcttcctcgctttcatcgttcatcaaaggtatcgtaatctcaatccgcgttcccttaccaggcgctgttacaaaatgtatggccccgccaatctccgtaacacgttcacgcatgttagccagaccgtaagaagcttgtttattctcatccagatcaaagccttgcccatcatcacgaatcaatacccggatcgcatcagtacggcgctggatccgtatctccattttttccgcttttgcatgccgtaacgtattggacatagcctcctgaacgatccggaacagatgattctcgatgcctttgatcagatcaatgtcttcgtccatttcgagcacaatgtccatgggtacttttgttttcagttccatcaccagatcacgcagaccttgttcgagatgtttaccctccagatagactggacgcagatgtaacagtaacgcacgcatctcggactgggctaccgaagccatctcctcaatcaaagccacctgccgctgtgcacgttcaaaatccttctccatcttccgtccaacggccgttgctgtcatggatatcgcaaacaattgctgcgataccgcatcatgcagttcccgtgccaaacgttgccgctcttccacaatagccgtaattctggcttgttcagcaagctgtgcattatgagtagacaatcgctggagcgtagatatctgatcttcccactttttgccgattcgtccgagttgctcacttaaacggcccacatcatcatcgcccagatcaggtacagtgcgtgatagagagcccttctcccacagtagaagtgtttcccgcagcagttcgagccggcgtttaacccggtaactctgatagaacccaaagaccgcaccgattccaatcagaagcagcaataaggccagacccgattgaatcagatgacgccaacctgtaaacggagcaagataaccatatgtatacaatacatacaaaataacagcgagcacaatgaaaaccaggaggatcccttcacccatacttcgggttaccatgtcggtatgtcgttttgtcttcatcggggtctcctccttctcttcatctattttactacggattactgatgtttaggtcgccaacaatataagaaatgacaaattttgctttatgttcactggattcatatccaggcgttctccatactaatttgttcatcatgccgctatcttgttctccaagaagattaatccggccgaaaagaaccgatgcttcaatctccacaccataatcttctggtagtgtaaggcgaacattacccataactccttgcagcagcacaattgtttgtttctcctccggaatcgaaagagatagatccgcgttaacctcacctatggcatgccacagactcatactacgtaacgtccaggatgattgatcccagtagtaccgagccatgaaattctgtttcttcataacgccttcgtccagatgaatctttttgttttttgaataaaagtaagctaaagaagcaagtacaatcaaaaatacaatcattaaattatccagcaataacagtgccgcaccaatgccaagataccgatgacctttgcgggtatccccattgcggacttgaagcattccaaccgttaacagaatcagtgcggcagcggtcaggaagttaatattgtcattcaataacatcattgtgccaataatcataatgacaactgcaagccatttactcttttgattcatcccgccgcacctcctctgtaagttaatctctctttattcaacggaaaagccatatcaggcaatgaagtcctgtatggcttaacttttgttctaccaaccgtacattatacacgatttatagaatatcatattgtccactaagcgaacagttattcttttgaagttccgttcgcttcattcttggaaccattgcccattttatttttgagggcttgtaattgctgatccactttgaattgtttttccacatctacaggattcgtatacgtggatgatgtgttgcgataaggtgcacgagctacgtcagcttcagcttccagctgcataattttctcttccatgcggtggaatccaagtgatgcgccgccactttcgatcgaatgcaagctgttgatagaagacatttgttttttggcttttgccatttgtgcacgggatacaagttcattacgtttgttacgcattttgtagaactcatctttcatatcatgcaactgttgcaacagatcttttgcttgtgcttcggactgtgcatgcagttcgctgtactccgtaattttttgatcaaagtagattttctcttccaacaatttgcgtgccacttcttcctgaccgttagacagagcagcttctgcttgggactcacgttgtaccgaagtacgctccgcttcatccaaacgttgtttcatgcggcgctcatttgccatttgtttagcaacagttacctctgcctcatgaatctcagcctccatatcacgcaagtactggttcaacattacaatcgggtcctctactttatccaacatatcatttaccgatgctttcgtcatatccttaatccgtttaaatactcccattttacttttctcccttctcgtaacgagataatttttggcgaagctcttcaacttcttttttcagtgcttttttctcgatatctttcatcatggaatcaagttcactttcttgcggtgctcctgctccgtaggcgttgttgtcataagaacggggaccagattgaggtctgccgttgaatccagggccgggaccgaagttaccaggaccttgttggttgtgattattttgaaaaggacctcttggtggctgatgatcatagttgtcgtatcctctgccaggaccagggccttggcccggaccgtagccatatggatcataaggcggatacggttcttttggtaccaccagtgctgcaataaagtatattaacaacgacgtgccgccagttacgaagatactgataacaaagatgatacgcagcagggtggaatccattccgatggtttcggaaattccgccgcacaagccggttaacatccggtcacgcgttgagcggtataatttgctcatgtgcttgctcctttcgtttacttgtatcctcttacgttggaatcataagcatatggatcaacgtgattggattcctttggtaccaccaacgcagcgatgaagtagatcaacaatgatgtacctcccgtagcgaaaatactgatgaagaaaatgatacgtagcagcgtggtactcaatccgagattttcagaaatgccaccgatcaaacctgttagcattcgattacgcgccgagcggtataatttactcattgtgactactcctttctgtcattgttcaatttttgtcttaagcgttccagttccttatccaacgtagaggatgacatgctgccagtcactcctgaaccatcttgattcatccgccggatatcgcggagactttgtgcttcatattcgagatcagagacttgatcatccagtcggttaaacatacggggtacattctgaccgttgtgattgcctctctggttcatacgttgttgtaactgaatcgtctgcatacgagcgtagtaatattggcgtttgctgtatacattctgatattcaaccttcagctgatcgatctgttcatccagctcctgtaatgccgcataactttgtgcatacaattcattgtactgttccattttttcctcgtggaggattttctcctgcaaggccagcttagcaagatgttcttcccctgctttcagagccatggatgcctgttcttcccgtttgttcaccatacctgctgcctgatcggcttgttgtttcatttgtctggtatggcttgcatattgatgacgaagtttctcggcttcaccgatgtcttggcgggtcgagaccaggaactgatcaatcagtttgactggatcctgactttgctccaaatgttcgttcagattggctacggtaatatcccgcattcgacgaaatacactcattatgttctgtccctccttttcataatcgtgaaagcttagtaccgaccacgacgactgcggttattgcttagcattgagataccaaagatgattaacccgatcgcgatgatcggtccgatcaaccatgccagtttacccatcagtgagatgataccgatgatgagaacaatccagccaagcatcacattccctcgtttaactccgtagtatcccagtgcaatcatcaggaccggaatcagataacccattaagtgtccaagaagtggagttaactttccgaagaggagtagtgcacccagcgcaatcaatacaatcgcccagccatttcccttattcaatctcataattgttgttcaccgcccttccattcgttccttttaatgtgttgagtcatttgttcgtttgtttcttgtttctgtgtttcttgtttaaccttatgtccttattctaggggattccgcgacttttcaaaacagaccgtggacggtttttcatcctagactcaggtcggggatctagttggacctttgactgtccctatataagaccaacgttccacctaagctgaatagcactccagataccttctattacccgtattcaggctacactttagccgatatcgacctgtagagagaatgatgtccatgtctctatttacgttcacactgcaatttcgtttctcatgattccgtattggatagtcattccaagccgtttctctaaccttttctgcaaaatcatctatcagcaatcccttatctctacttctatactctcttgtaaaattacttatttatccaaataaacaaaatttagattgttctatatgtaagcgtttactaaaatagaaagtgttactatttctaatgtcaggggtggaactgaaactgtgcgaccaatcagctatctccataaaatgatcatcttcggaatcctgttaagcaccctgcccattttgttaacgggaattgccgcatttatctattcatcaaaccaaacagagctgcatcgtatgcaggccaacagacagttgctggaactaatgcaatcaaacgtagagcacaaacttgctacagtcagttatatgcttgatcaggccgttcgctctccggtaaccctccgttccctgtctgcttcttcttcactagaaggaaatggaccattacttgccgacaaactacagagcgaatttcagaatatgaggtcatgggaacctttgctggatattactctggtgaatcaatctcagaattggcttattgatcatgccggattgtaccgtaatacggatttcccactggctcttcccatgaaggaattgatatcggatacgttaacttctggatggcaactctccccttcatcggtgtttagcaatgatgagcgttcacccggtacaggctgtatttatcatattgcccttgcgagatctattccgaatctgaatacgtcttccgatgctgccctgattgcgggaatccctgcatgctctttgcaaaacacactaggcgaagcctccttaggcaatgctgcctcaggactgatcattttgaatcgggaacaacgtatcttggtccatcccgatcctgtatacattggacaaccgttgtctgccattggattacaggatcgggatacggaagccaacataaccaaactatcacccattacattttcaacaggctttgaaaaacgggaagttaagatcgccgatacacattattccctgacgtatagcccttctaccttaaagggatggacttatgtgctaatctcacctaccaatattctgacacaagaatatatcgatatcggattacacaccttgtatatcagtatctgcttacttttactttcattattactcgcctggctcggctccaagcgaatgcatgtcccgattcgtaaacttttaacccaacttggtgacaaccacctgtccaaagaaggaaacacggtagctcagcaatcaccaccattttctgatgagttcgaacagatcagagcaggggtctcacaattatctgcctctcactcccaattagagaacacacttaatgtgcatctattgcagattcgcaatcattttatgatgaatctgttccagggtaagatccctgttcatactcttcatgacgccctgaatgaatatggctacacgcatcaggttcgggaatggcaacaaattgctgttattacactacaggccgatcttgttaatcatacaaaatatagagctagtgatcgtgatctcttattattcgctattcagaatatattggaggaaacggttgtgcataaccaacaattgcttcccattgtgctggaacatacagtagtcacggtgattggcaccgtggaacagaatcagtttattttttcacagcagctatatgtattaacagaccagttacaacaacagatggataagattctggctcttcaagtcagtataggattcagccagtcgcacagctctctacatcacatccctcaagcttacacagaagccttggaagcactgaggcatcggatgaagctgggaacaggcattatttttcaatatgagaacatagatcattacactcccacttggtccatgacctacccggaatcattggaatattcgttgatccaagctattcaaaatgcggacgaagtccaggcctctgctcttctgaaacaactgcttgaagtgatctttggaatggaggttacaccggaggagtatgaggtggctcttacgaggctgctcacgcatattttgcaaatgactcaggaatccggcatacgactcggacagatctcccaaggtcgtggttcgatgtttcatgaacttcatgctttgcagtacgctgctgaagttgaggattggtttaaccatcaagtcatcttgcccgtcatccaggtttttaaagcgagacaatatgcccagtatcagcatatatctgagaaaatgattgccatgattcatcaagattatgataaggatctgacgcttgaggaatgtgctatgaagcttcactacaatgccaactacttaagtagtgttttccgcaaagagacaggctgtgcatttagtgaatatctgaccaagtaccgatttaatatcgctaaaaaatggctggacgaaagtgatctaaccgttaaagatatcgcagcacgacttcggtacaacaatccgcaaaactttatccgatcattccgtaaatgggaaggaatcacccccggccagtatcgggagcgtaagcaaaaagcagaagtatcgaacagaaattagacaaggagcacgactgtaggtcgcactccttcggccagctcggatacctctccatatggccccccgaacagggctagggctcggacctgtgacaactcgattaaccgtggagtgctctaccaactgaaatatcagggaatatgcttcagagatcattctctgaaaactaggtctgtgttttgtttcgttgtctcgaacatctctaaataaacgagggtctggttcaaagcggttgatgaattagtggcttaaaaaaagagggagcacataaccggctcccttaaattacaactctacttctacaatcttaacttcatatgtttcaaccgttcatcttttggcacagcgttgtgatgcttcctagtgtcatcttagacgttagactacattgtctccgtctcaattcctgattatcattacacgtgccacgcttatgcgatttatcgcttatccttagtgcgaactgttttcatattgggctgttcaagttgaattagaattttaccaaatcttcctccacgtgagaaggtcacagtactatccttgtacgtatcgctaatgtaatcctcagccaatctgagggaatcttcatccgatggtaactcatacgtattaagccattctggcagcttctcgataatctcttccaccggtacttcaaatgagttaacttctctcgtaatgatcatcgtataagaataacccttcaaatacagcaactgttggatataccccatatcatcgaccttgtgtgaagaagttacacccagtacatccttaagttcatccattagtgtgtgttccttctgtcccgccatagtacttatatacacatacttccgggcacaattgatcgcctgctcaatcgtttcccaatccgacatcgctggacacatggatgcaaatgcaaagtcatatttcttctcccagcctttatcctgaatagagatttcctcatatcgttcgtttacgatttcgattttggattccagagctggaggtatcgtctctttcataagggagacaagcaactcagaaggctcaactgccgtcacacttgcccccttttccgcaaaaggaatggtaaatatgcctgaggctgctccaatgtccaaaatggataaccctgcgaattccacaccctggttttcaatccagcccataatgcgttcagaacgctgctttccttcttcggtgaacgactgtgcatgataatccctggcccatcgctcaaaagcttcttctatattaaagggggcgcttttcttcttatattttgaacttctcagacgattcttccatgcctcttcccatacagaaagatcaaataacagatcggtatccgatacattttttccattagtcactctacttcactcctccatattaaagactttacttatctacaatatactcaatataatcatacgtcaatctttactaacgtccatcttctcttactctagattttcttactgcacataaatcgtttcatataaaataaaaatagccctacacattgcataagcaacatgtagggctattcaatataccggcgagaggactcgaacctccacggtttcccactcgattttgagtcgagcgcgtctgccattccgccacgccggcatatgctggaggcgccacccagattcgaactggggataaagcttttgcagagctgtgccttaccacttggctatggcgccatattttggagcggacgacgggaatcgaacccgcgaccctcgccttggcaaggcgatgctctaccgctgagccacgtccgcataatggctggggatataggatttgaacctatgcatgacggagtcaaagtccgttgccttaccgcttggctaatccccaataaaaaatgaaaaaacaaaggggcgatcgaggggaattgaacccccgaatgccggatccacaaaccggtgcgttaaccacttcgccacgaccgccataaaaggttaatttctaaaaagttaattggcaggggcagcaggaattgaacccacaccaacggttttggagaccgttgttctacctttaaactatgcccctaaaaactggtggaggatgatggattcgaaccaccgaacccgtacgggagcagatttacagtctgatgcgtttggccacttcgctaatcctccaggattacatggtgccggcgagaggacttgaacccccaacctactgattacaagtcagttgctctaccagttgagctacaccggcatattaaattgttttataaatggtggctcgggacggaatcgaaccgccgacacgaggattttcagtcctctgctctaccgactgagctaccgagccataataaagtctaatcttaattccttacactttatatagggcatcagtgccatacagcagatgtagtgaacagtttgcctcatgtaaagattaaatggcggaaccgacgggattcgaacccgcgatctcctgcgtgacaggcaggcatgttaggccaactacaccacggttccaa

SEQ ID NO: 7 - DNA, 336722 bp, Paenibacillus xylanexedens
  source 1..336722: mol_type = genomic DNA
tctccaataaagtattgaaaagagcgataagctcattttgaatctgacgagattaaaaatctcatttgtgctccagtcgatccaagccaaggcttatctcaaacttttgcgttcattctgcaagcagaatgtttactcactcgttgttcagttttcaaagatcaaacttgtttcgttactgaatgtttttctcttcagcaactcttatataatatcatgtccgaaccaactttgcaagctctttttttaagtttctttcgaagcttatttcaatcgcttgccgcaccgtgtatctcgtgtttttttggccggaaatagaatataccatgtagaacacacacttgtaaagagttaatttcaaaacttatcaaatctacgatctaaccatattaaggaccttcaatctaccatgaactctcaggttcaattttattatcctgcagcttaatcttctttatttaaatctgtctttcttctatatataagaaggcaaccctctcaactcttatattcgagacgaaagggttaccttctatagtaatctatatttatttacgttctactttatatcctttatcctcaagcagtttcacgatgccgtgatcgcccaagtagtgtgccgcaccaacaacaatgaaatattcctcacctttgccgtttttcaagtaaccatcgattttgtccgccataccaatgttacgatcaaccagcattgctttgttatattcctcgttagtggagaagctgtttgtcagttcaagcagttgctcgtcattacccgttttccacatctcagccatttctttcacactgttatccaacacgtcgaagttttcgattgtcgctttcagtgtttcctcttgtgtttctttggaaaagtcgttaaacatgccaagttgagattgataactctccaactcaataactggaagtttgcgctcgatcgctttctggatgaaatacagatccactcctgctgacgcttcgtatcctgccgttgtggacttcaaacttgcaagtgtactctctactacccaaggcttaaatgcatccaaggcgttagactccagaccatttttcttcaatacatcacccagcttagtatacgtttcactggaaatgtggtctttcagtgttgttccatcttgatacgaacccagacttagaaccagcttttgctgctcttcatcagcggctttgctaatatcaatctctaccccgagatagtcagcttccgcaaaggcttcttcaaactccggacgcagtggatagaagctctcatccgcaatatgcatggaccctaccagatagatcgtgttgccattgctttcaacttcccacatgaagccacgtccaccggtttgcgcagtttcagttgctccccctttggataccaacagcacggtgcgcgttgcagcatcccagcgaacttcataacccgcagcatcaccgacgatgcggattggcgcatacgttacaccgttgatccttgtaagcttgcttttgagtgtaatcgttttgccatctactacagccgtgatcgtatcatctgtcgcagttgttagcttcacatccatagcatccagcgtagtccgcagcggaaccaatgttgtacctttctccaggatcggcgctcctgtagcatatttcacagcttggtcattaaccttgacggaagttccttgtggagcagccatagctggcactgcagatgcaagcaaacctactgagatggttagagataagagcatgcgtttccaattcttcatattatgtaatctcctttattgaatatagttgccaatccatttttaatagaatagacatacttagatactacggttaaagatgggaattggtgccactccacaaacggagcagcacgttctcccttcattattactctcattagataagaaacaatagatacttatcagcgctaggaaaaaaaaggctatagaaaccttcggattgccccacagcttcactccatatgcgacgaagaaaatagcgatagctaatttagagatgctttggtagttgccctgctctgaaaaggctgaactgctaaatacaattgaaagtagtagtgtagtcaggatcgatcaatgctttaaaccacagaggttccctcaaaaactgtatatagaacccttttaactgctgcatgatcatcgaccctctcctgaactcgatttaatatgaccaccgacacagcacaacacttgtcataattagtgagaaaaagtcatcaataaagcttatctatcaggacatattttcatgataagtaggaaaaagcgcaaaactcattttgcatattcatgcatgctaatatatacggatttttgcgatattttttcttaattatacatagcaaaaagaccactatctagtattagataacagtctcattttagaatactttattcatttaaattaaaatcattccgtcttctattcttctacagaaacataaatacttaatcgtatgcgaattgccgctatctcaaaaccagttagaatcataatccaatgatctttcctccccttctttctctagtaatatgctcaggaaaacatcaagcagctcctatcagcttgagtacaactaaaaatattgctgggataatcgaattgatggaattaaatatccagtgaacgatgatattcgaccatatatttctgatagctccttctaaagtaagtagaagctggatccttattcttgcggcttcattcggaaaaaatctcacaaattttgtgcttcggcatgtagttgtcatgattcatcctctggtatagagtctaactaatcttcttgcacatttcggtacagtttatctaatatcatttttaactgatttaattcatcgtgttccaaacctcgtgtaacatagtcatgcgcgtttttaactgttaacaacagctttcctttaacttcttgacctttagaggacaaatataaataatgtgagcgcttatcctgatcatgaacaatacgtcgaaccatgcccttgcgttctaaagaatgtatcattctcactaccgttgtttgatcccgatcgatggcctccgccagctctttttgagtcatagctttatccatatcaagacaggagataatgctccactgctccggtgtcaccttgtagggctttaattgtttcgtaaaatagtttgtaagcttaacatctgtacgatggatcaagaagccggtaatattatataagtccattgcagtaccctcatttatcattttcttaaatcaaatatagtcgatctctcaaaggttacacatgaaatccgtcaaaaattcgttaatttcgtttagaaaaaatgatacatggatacaatcaagctaagtatgaacaaaatgagtgctggaatggccttctgaatcggatctttagctaagactattaaagtaagcgctccagcaagcattgttccggctagaagcaaaccagctaaaattgctgcgacaggcatccagatgccaacgatcataccagctgcccccacaatctcgaacgaaccagtcaaaacattaaagaacgatggcagtccaaaacgtttaaactcattggccattttaccggaaataattttgcttcctgtaaaaaggaaaaaaccacctaatagaacctgtaaaactgtgataaaaatgaacatatctacccctctttcataaagttatgcatatgaatttaatatatgctatagcatgtattttgtttgaaattttatatattgtcaaccctaaaataaagttttatagattatagccctcttatgtccttttaatttttcttagattatcgttccaaaggaagctttctttttcacatatcgttaatatttctagcatggataattcaatttctgttctttgttgaactgtggtaaatttctctgtaatcagccaattaaaagcctatgcttcttactttcaataaatttagtaacaaacaaaggtaatttacttaacttattgtcaattcgacctacggaatgtaatttagcttgtttatacaaaaatcaaccatcccaaattaaataaaacttctaagtaattattcgttcttgacttttgtaatcgaacaccattaaacaacatgtagcgcgttcaacattaaattggccaccaatggctgcaagctaatttcaaatagagatatgcatatttatggataaatatgcatatctcgctaattatgacaacacacaacaccttcaaacactcaacctagatcttatatgccttcatggctttaaacaattccttaaaggttggacgtttaccgtacatcaacacacctgtgcgatagattttggctgcaagccatccgaagatgataatggatacgatgagaatggctaaagacgttagaatctcccaagttggcgcaactcctgcgccgattcgtaccagaatcgcggtcggcgacgtgaatggaatgaagcttgcgattttcaacaacagaatgttcggcgtagaaatactgaagatcgcaatatagaaggaaacaagcgacaacatcgtaatcggcagaacagcctgaccgagttcttcagtacggcttaccattgaaccaatggcagcaaacaacacggcatacaggaagtaacccagaatgtagaatatgagtccgtacacaataaccgcaatattcacatcacttacattcatattgaagtcacctagtactgcacggttatgcggcagcaagatatttccggcaactaccgctccgaaaatcccgatttgcagcatccccaccatgaaaatcccgatgattttaccaaacatctgactgagcggtgatacactcgtaatcagaatctccataatacgcgaactcttctcagctgtgatctcggaggcaatcatgttacctgtcatcatcgttgaggtaaacagcaggatgatcagcaagtacaccacaatatagttaatcgggctcattttaccttcagactcagtacctgctccgctctcatctgtactcaaactttgctcagtgagcttcacaggtgttgtaatcagttccttctgctccgctgtgagtacatccttcacaaccacatccagcttcacactctgcaacgctgcttcaatggatgcaatgatctgaggtgatacgtcttctgctgaatatagaatgggctgcgggaactcttgcccggaaacagcttcaaacttcagataaccatcggtaagtcctgcttccacatccgccgcaagagcagcctcatctttgtcaccactggcaatgaatagataggcctgatctccttgagccgcagagaagctctccagtttctcggaaacttcaggctgccctgtactcaaaagaccaatatttacaggattactgcttgaagctccaccaatggaacccccattaaataaggtaatgaaatacgggacattgagtccgattgaaattaaaagtgcaagtacaatggtcgttaccatgaatgatttcgttttaactttgtttttgaatgtaaaacccgtaatcgttcccattttattcattcgactcacctacctcacgaataaagatttggttaagcgttggttccttcagttcaaagtgttccactgtcgtctgagtcatggctgttctcagaatctcttgagccgcttccacctgactaatatgtatcaggtaaccacgctcatttcgctcgactttcttcacaccaggcaactgttcaagtccttccacactaccaatcgtacccaggaatacctgttcacgcggataccggctcttgatctccttgatctctccttgtaccaccgtgttggaacgatgcagaatggtgatctgacgacacaactcttcaacgtgctccatacggtgtgttgagaacagaatggccgtgccttcatcacgcaattccttgacggtggacttgagtaattccacgttcacaggatccagtccactgaacgcttcatccagaatgagaatctgcggtctatgcactacagccgcgataaagcccattttctgctgattacctttggataactcctcgatcttcttatcgtaatactcaggtacctcaaaccgattcagccagtacttgaggctctgatctgcgtccttaccattcatgccacgaagtcgtgccagataattaatctgttcgctgactttcaccttcgggtacaatccgcgctcttccggaagataacccataatctgttgcagctccgtattatagggcttgccgttgtacaggatattccctccgtccgggtgaatcagtccaagcaccatacgcattgtggttgttttacctgcaccattggctccgagcagtccgtaaatctccccctcttttacattgagcgtgactccattaacggctgttttgtctgcatattgcttgacgacttgcttcaattccaatcggttcatcatttatcgtctcccttcggttatttccactgtacgggtgcatacccggcaatccagaatgccagcacttcatccaattccaagttacggattctcaatacccggttattggacagctccagcctctcctgcgcctcgctgacccgggttgtaattacgcgaaccagacctccctcttctatagaagattccacaacaccaggaatactttctggccttaaatctccttcataccagacttctttccactgatcgagcaccatatctttctcggccatccccagtgactgaccacggtgcatcaatacgatgtaatccgcaagccttttgacttcgtctgcaatatgtgtggcaatcagaatcgtggtgtctccccccgccatgaaggtacggaactgctcaaccatcactttccaagcaaaggggtccaatcctgatgaaggctcatccaaaagcaatagtcttgggcgagctgcaattgcagctgcaatctcaaattttcgcctttctcccttggacatcttgttcagcttcacatcaacaggtacttccatatcctgaatcagttggtcgaacaacttcatatcccaacgtgggtaccagtacgcccggaaatgggccgcttcttgtgctgttatccggttctcttctgaaccagcgttatctgccacaaaaccaatctgttgtctcagttcaatgggaagtggcccatcatgttcctgaccaaaccatataatctgcccagcatctggaagcaccacttgctgtaacatgttaagaagggtgcttttgcctgaaccgttgtgaccgagaatagcgactatatacccttccgggatggtcagatcaattgggccaataactctgcgttttcgcattttggatacgccgttcaactggattgctatgggttccacgtatgaatcactccctcacttcacgtaaatagccttcaggacttcccggaataggctctccatctcttcttccgtacagcctaccgatttcccggactgcaccgctgcctgcatcgcttcctgtgcggcctttaatctataattttctctgtcaccggcttctacctgggccacaaatgtacctgtcccctgcttcgtacgaagcaagccttcattctccagatcctgatagacccgtctaaccgtaataacactgcaattcagtgctccggcgaactcacgaatggacggcaaatgtgttccctcccccaactgacccgtaattatcaacgatcttaactgattttcaatttggtggtataaaggttcagcgctattttcattaatttgaatgggtattttcacatcttgcacctcgccctccggtacactccagtctgttacctgaccgtgccggtttcatcctgtattcgtacataagctcaattctcattttaattcaaatcccgatgaaccagcttcttcagcgtaaaacgactagacagccataatcccgctacgccagccaccagagaaatccacatgatcggggaaagcagcccccatgatttacttccatccattacaatccgcaatccgtaactgcctgatattcgaatcagtatggatatgccaatggcgaatggtataaaaagcatactgagaagcaagtatttcttgccactgttcagaaactctccgtaaatatagaaccctgttaccaaaaggccataacctgtacaggtaaggctaaaggccagatactgatcccatcggaatccttcggcatgaaggttaaccacgtataacgatccgtagaaaaagattccattgtacgtaaacgccatcagagactgctgtagcctggaccacatcaccacttgttcaggaatgggaattctgcgatagtaggccagcatctgcgtataagaatcctcctgtatgtaacggaaggagcgcctgcagaacataaacccttgaaatggcaacatgattaaaaagaaggaatccactactggattaataatatctgtctgttgttgtcctaaaaacatcacaccgctcatgccgccagtgtatatcatgaataatgcagaccatagccattggagcctatccttactcatctggctgcgggtcaaccaccacgcctgcttccattcgttcatatgcatgcctgcctttcacctgtcattcacccatgttgcttactgtgattactgtatatatcaatatacacagtatacagacctatttctcatcccgtcaacccctaattttcctgaatcaggaagacgggatgggacacagtacgaatttacgttaaaataaattatagtaacgaatcatagaaaggaaggttacagctatggattggctgatagagatcggatttgtcctccttttccttatcgtcgtaatctggttggtcctccgggatgagcctcatcgtcattctgccaaaaaaggcagacaccgcatccgccgtaacaacggttataccgactctgcttcgggatatccggtcattatgggagatgactcctacgatcgacatgctagacacacaccggatcacaaacatcatgattcagattcttcaggaggcacacattctcatcacaacagcgatagtggtagcagcaatgacagcagtggggatagtggcggcggagacagtgggggtggtggggattaaacatcatttcccaatcacaaaagaagggctgtacccgttattgtgtaaacacaattcgggtacagccctttgccgctctctagcacctgttagaagaagaggccttacgattaaacgaggttatagccactaggcagactgcgatccctgcggattgcgcgaatctgagccagcgttaaccgttgattggtggagatcagggattccacgtcattgccacggatcagatcatccaaatctctcaagttggtgttgcctcggaagactcggaatccaccttggaagttaggacgtgtaaacacaaccagtgttgcattagaacttgttgagaaaaagcgcaggctctccaccccatccaaaatattgtccaggttacgaagacccgtgttgccacgatagatgcggcttctccctctgtagttctcttctgaatacacggtaagacgtggatacgtttgactgacgttgactgtttttttcattttgtttccccctctcgaactcattctatgaatgaatgaaagaggaagcgtggacgaatgatctgctagattcgtccattttcatattttcagaagagagtagtgacgccgcccaagtaacaggaggttatatctcaacttttatacgccgaggataacttcccataccggacgtgtatgaccaccaggatataagagatataaaagaacatacacgacaacacctgttagcgctgacccgaaccagatcatggacgtgaacttaccccagcggcgatgttttccgaacttctttttgaaccccagcaccagtgtggagatgccaaatatcgctgccacggtagccaggataatatgaaagatcagaaatatccgataaaagatctccagatccgggtccccgccccaagccgtattgcccacgaacactgtacgagacatatagatcacaaagaagattagagctgcaatcgcacctgctaccatggcggactgatgagcctcacgtttcccccgaataatcagtacccatccaatccccaccagtactgcactaatcacaatgaaagaagtactgatcgttggtagccaaaaatacatatccatcgtgtgttccccctcttgtcagaacattacttcattatttggcagccggattgagcggccctcctgcgccccctgcaggatacgaatcatcatcatcttcctgcttctctttccgataccattggaaaaagacataagccagcatcgaggcaaagattccttcctgaataaacttcatgacaatgccaccgacctgctgatcttctttcgcagaagacaggaagttgaagaacgcaggcccaccgaatgagcgaagtaatgccgtagaatctccagacacacaataccgcatggcttcagcccatacggccgggttgctgtacgtctgatacaacggctcggacgcaaaaataatcaatccacacgcaggcgtaagcagtaccatattcagaaaaataaaaccgatcttggataaccccgatgcttgtctgccttctggcaacggattcagcaatgtccaccacatgagcatcgaggtgatgaacagtgcaatataatacaaccggtgaacggtaaaattcagcatgacgtaatcatgtacaatcggtaggtgatacagcgagaacagcccgttaaagagcactgccgcaacgatcggatgagccaggaacgatagctgtcgtgtaggcaaccagcgcacgattctgcgccatacccagatcggcaaacctttcatcatcagcggcggagctaccagataggagaacgccatacttaccatgtggaagctaaacatcacgtgaccaagcagattaaatggtccagcttgagccagatacaggacaaacagtcctgtaacaaacatgattttctgtgcagcagtcgcaggttctgcatcctttatttgctcgcttaacggtcccacaagtaccagataagccgcagcaatgattagaaataaagccaatataagcggactccataaatcgttgaagctaaaatattgcaacccgagcatacgggaaacctccccgtgacctgatttggttgttgccatcattactttgtgaagattcattcgccaaaaaggggaaaagacggcggcaatgcgccgccgccatctcttttaccaccacacccaatagagtgccataatgatgcacgtaaaggctacgaaaaagccaaaggccatgaacagaatcggcatcaagtgccctttgtccttcaagtgcatccaataacccaattgaacgaatacttgaagaatagccatgacgagcaaaataataatgataaaggttgtgttgacccctccggcagaagcagccgcaaacgcaatcagcgtaagaataatggagaagataaacaccacgacgtgtttctgtggcccttccgtccggtgacggtgtttcacaggctgttgatctgtcttatcctgtgccgacatgtgctaccccacctttccgagcaggtacacgaccgtaaagatgaacacccataccacgtcaataaagtgccagtacattgcggagacgtatactttaggtgcggttacgaccgtcaatccttttttgaacagctgaccgataatgattccgatccacacaataccaaaagcaacgtgggctccgtggaacccgaccagtgtatagaatgctgaactgaatgcactcgtggtcatgccaaactctttatgtttcacatactcgtagaactcgtaaatttccagtgcgagaaatcccatacccagtactaccgtgatgccaagccacaacgccagtgcatctcgcttgcccttatgcatggcctgaatcgcaaatacactcgtcaaactactgaccaggagaatgaacgttgcagcggccacaagtggcaggtggaacagttcattcgccgtaggtccatcattggtttggccacgaagagccaggaaggtagcaaagagtgtaccgaacagtaccgtctcgccgccaaggaacaaccagaaggcgataagcttgttacggccttccagcgttgctttctccggttcatgcggcaatttttcgttcaccggttcggcatgtgaggttgtcatgttctagcccccttctcatcctgatcctccggttcaatatgccagccatgatcatcataaagtgaacgaagtgccattgcaccgaatgtgattacgagaccaataataactacaatataattgttgaaaatgacattcataaatgcattaccaaattcatcattgctgaacatcaagccaagtccggcgataaagatacctactgacattacaaacggcaacggcgttgctgaaggcatatgaatcgaacctacaggttctgccggtgtcatctccgtatgtcctgccattttttccttccaatatgcatcaattccgcgtaccagcggcgtctgcttgaaattatattccggcggcggagatggaatagaccattccagtgtacggccgtcttcccacggatcgtttggcgcgccagccggttttttcattgtgatcacgatgttcacgaggaacatgataaccccaacacccattagaaacgcaccgacggagctgaccagattgagcaggtcaaagtcctgattcggcaagtatgtaacgatccggcgctgcatccccatcagaccgaggaaatgctgtacaaagaacgttaattggaaaccgatcataaatgtccagaacgtccatttgcccagtgtttcgctgagaatacgtccgaacatcttcggccaccagtaatgcagtcccgagaacaatccaagtacgagtccccctacaataacgtagtggaagtgggctacaacaaagtacgtatcatggaactggaagtctgccggagcagatgccagcataacgcctgtaacaccacccataacgaaggttgggacgaatccaacagcaaacaggtttgccgcggtaaagcggatctgtccaccccacatcgtaaagagccagttaaagattttgatcccggtaggtacggcaatcaacatcgtggagatggagaaaagcgcgttggctacattacccagacctgttgtaaacatgtgatgcgcccataccatgaagcccagaaaggcaatcaggatggtggcaaataccatggagctgtatccgaacaaccgtttacgcgagaaggtcggaataacctccgagataataccaaatgccggcaaaatcagaatgtatacttccgggtgcccgaagatccagaagatgtgctgccagagtaccgggttaccgccacctgcgacatcgaagaaattcgctcccagtatacggtcaaacgtcaaaagtacaagccctaccgtgatggcaggaaaagcaaaaaggataatggcagatgtaataaatgtcgtccatgtaaacatcggcatccgcatgtaggacatgcctggagcacgcattgtaataatcgttgcgagaaagttaatgcccccgatgagcgttcccagacccgcgatctgaaggccaatggtgtagaaatccacaccatgcgttccactgtactcactgcccgaaagcggagtatatgaggtccagcccgcatccggtgctccgcccataacccagctcaggttcagcaacaatccaccaaagaggaatgtccagaaacccagcgcgttaagaaacgggaaagcaacgtcccgtgccccgatctgcaaaggcacgacagcattcataatggcaaaaataagtggcatgacaccaaggaaaatcatcgttgttccatgcattgtaatcaattcgttgaagacctgtgccgatacaaaatcattcataggcttcatcagttgaatccgaatcaaaatggcttcaatgccgccgattccaaagaaaaatccacccgcaaccaaatagagaatggcgatttttttgtgatcgacggtggtgatccaatccatcaagcccctgtacctcttgacgctatgcgcatgagccaaggttgtgtacccccttcttcgtccttgctgttctattcatagtccaatttgtagttggccagatattcggcaattccgtcgatttcttcatccgtcaacccaagatctttgggattcggcatggtattgcccggcttcacggattgtggatcatggagccattctttcatgttatccagtaccggattaccttcttcctgtccctcgcgagaattcagcaaaatgcctgcgacagattccttgccgccgattcccgtcaggttaggtgcaaccggtccaccttgatcaccaacagcgtggcaagaaaggcagtttgttttgaacttttcggccaattgagtgtcttcaggaaggactgcgggtgctttcatctggttcacccatctgtcaaaggattcctgactcactgcttttaccttaaactccataaaagcatgcgatctgccacataattcggcacatttaccacggtaaacgccttcattcggtgcagagaaactgaacttgttaagtgttccatccgggtttgtgtccattttgcccgcaagtgacggcacccagaaggagtgaagcacgtcagcggtttttaattcgaatgcaatttttgttccggtcgggatgatgagatcttgagcggtggttacgtcatattgaggataagtgaattcccaccagtactgatgcgaggtgacttggaccttaagtgcatttttgtcattggacagatcttcgccttgggcaaaaatcgtttggaccgtcggtactgccagaacaataaccagcaataacggaatggctgtccagattacttccagcttgaaattaccttcaacctgttcgggcatctcagtctgcccggctcgtctacgaaaccggatcagaacataggccgctatggcaaatacaatgatgagcaccacgatcataatcgcgatggataacttcatcagatcatattggccttgcgctacaggaccctgaggtttcattaccgacaagtcttcccgcccgcatgcggatagcagcaaagagaacaccgccagcaaggggagaattcgctttgcaacctgccactgtttcatcattgatctaccccacttttttacgttttcgtagattaccgttgtcgttcggtagaaaggcaacaaaaggtacgtttcagcacgatacgcataatcctcttcatcatacagaacgcttagaaaaataacgcttccagtactcccgtgatttcctgctcagggcatgtctgcgcattcttccaattcattctatatgcttcaatcacttattaaatataagttgagggtatgattttgtcaatctttggacacatgttcacaaattgttcactttatgtaaaaaaccgctctacaacttgatttgcaaacgatttcagttaaaagtattacactctacatttgaaaatttttgccaaatttcggtgataaaactcgatttattggtgatttttctcacaatgaaaacatgtgctattatgcaaaagaaagatcagaatttatggaaaacctcttccatatccattcagaagacatgcctatcgctccataccgctatctttaagctcaaaacagcatggagcatttctgagaaagttcaactcaagccctcttcttcactgagttcatctcacgtgccatcggtcagaatcaaggggccattcccagtaatcgcaaccgtatgctcatactggaccccccagctgccatctaccgtccttaccgtccatccatcttcatcccagacaacggccccagaactgccttttgtaaagattggttcaatcgtaataaccatgccctcggtgagcatcgtgcccgttctacgtttgccataaggcagaacatttgggggctcatgaatatattgaccaatcccatgaccgatgagaggcttcacaatcccgtaccgatacagtctggctgttcgttcaatggcacttccaatatctcctagtgtattccctggaactgcctgggcaatcgcccgctcaagtgccttctccgtgcgcctcatcagcttgcgaatggatctgcttgtttcaccaattccatatgtccaggccgagtcagcaagccagccgtctttgttcaccaccatatcgatggtcactacatccccgctcgccaactcctcttccccaggaaatccgtggcagaccacttcattaacagaggcacacgtcgcgtaaggatatcctttataccctttttgctccggtgtggctcctcgtgctgccagaaactcttccacccgctcattaatcgctgctgtcgtgataccagggaccatccactgctcaatatgctggtgacaacttcgcaaaattcgtccagcttcccgcatgtagccaatctcttctttggttttcaaaatagggtccacatgcattcatccttcccgctgtaggtgtactcccatatatatgcagcaggaacgcaaaaaaaaccgcctgccggagcttatcgcccgggagacggttctattcattatcggaacagtataatcagagttgtgtgttgtttcaggacacggaagaatccatcttgacaagctcatgctcaaccacagaagtcaattcttcctcgtatccacccgtaatccggtattttctcacgtactccttcacgaatttttttggatctttaggacggaaaatccgagtcatttccctcaaactttctttgacctcattgtgacctttcgttgccattgtaattccctcccaaaacgttgaaagtgaatgctccgtttagagaatgccgaataagtcttaaatgccatccatgaagttgtgtgcgcggcttaaagcaagctttaggtcgggaacctcgctagaaagcaagtacctgacactataaatacccgatatgattcggaatgaatcataatcttattgtagcatattcggaagtatcttacgacttgacgatttcctctaataaatataacggttttcatgcccaaaaagtttaattccgaatcatatgttaagattgccaccattctatacggaattaatatatccagcataacaccgaactattcgggggatattatcacggacaacccatacagttaaattactggtatccaaaggaggcgtcgtctcatggaccgcaaagaacaagatatgctgcccctttctcatgaaaaggtggaagtagacggagtttacatcaatgaagccggacgtgaggaacatctgcaccgggggcaacatttcccggccgatcccgttcttggcaagtcggaatggaaactgaccgaatatgcatatgataatcatcacgaaggaagaaccgatgagcggttggttcccaaagaaaacgacaccgataaaatgggcaagattacaaaccctcgcagacagatcgagggcggataacgatttcgtttaaagcaacctttaatcgtaaacgataataggggcacagtaagctgtacaatggcttgctctgcccctgtttgctttttcctatgtgttgcatccccctccgttcacaggcaaataaattcatcggttcagttctgtccacctctctcatagcctagttaaaaaggtcaaaggaggctggaccggatgtcccccatgaaatcgtctagcggtctggatgaaaatattgccggtatgctttgttatctgtttacctttgtaggtgggattgtctttctcgctgtggagaagcggagccggttcgtgttatttcatgcgctgcaatctgtaacggtctttggcatcattatggtcgggcatgtattatcggctttccttccgttgttcggaccactggtggcatcgctgttatccctgcttggtgtagtggtctggcttattatggtcgttaccagcttacaggggaaatggctaaaactgccgtgggttggcgattttgcagaaaaacagctgcgtcatctgtaacttcaaacaaaaggtatacgtgttccaaaaagaaaagacgatccgtttccgttcaaccgggtgtggatcgtctttgattataacgagggaaacgagtcaacctctagcccttgtgtcatgaacacgtggcccagaatgctttttacggatcggaatgaaacttagataggtaccacatctccatacccattccagcggcccatactggaaccagcgcatccacagattactggcgatgccttgtaaaataaccataccaatgcacacaagggtagacaccatatacgatacagcagcatctgcaaatatgagttggtataccactaacaaaatgatggtctgtgcaatataattggtcagggccattcgtccgaatgcatgcaggggacttaacattttggaaaaggtcatgttctggttcaatctcagtaatgtacttagataaaagatggataccaccggaccaattgccacaccgatatgttctaatcgaaaagcagcatccatattggcttgctcagcaacaggcaggctcgcaccaatcacttcgtatagaaacggactcatcgcatccggaggagcaacccaccacatgataccaatccccaccgtagaagcgatgaatgaaatgaaccagattctgcccagatacgggagtcctttctggatcttctccatcagttgatattgacctgctgacaatcccagtataattaaaaaaggaatcgttagcattttgacacctatcgcggcggctgcaataaatcccaccacaccgatcaccaaattcacagttcgaggtgcccaatataacggaatgacaaccagccctatgatggcataaagaaataaagcttctccagactgatactgttgatgaatatatcccagcgctaataaaataagcatcctgcggatatagagaaacagcttcgtttgacctttggcagctgaccggcttagaaaaagataaaatccaaggccaaataaaaaacagaagatatcgtaaaaacgtgcctccacccaaaaatataatgctcgttggatccaaaaatctacacgagtatccggcttcaacataacccacaatgccaatacatttacaaatggtaagcctatcaaggaaaaccctcgaaacaaatccagaaacttcattcgatcttgttttaatacaggttgataattcatcgttcctcccagtgaaattattgttatgtaatcaaaaagcgattggatcgcttatctctttggtgtatatccccatgcatgataacagtctatccttcatacaacatggcttgccatcgaattaggtgaataacttcttacatccggcataaggtcttgttcctgtattgttcctgtacagcggcatattggacgctatgctgatgataaacaaaacaaaaaaacaccgaaaacacgactctgctgagtctgtatcttcggtgtttcgcaatgtaaaaagggcttcttcatgtgattgaatattcatagcataaatgatgtatgtcataaaccattcatgctgtatatcttcatgattaacctgattcattattcatcttgtgaatcgtctatttataacagttaacataacaatcctgctggatgataaccctagcctacttcggctaatttaagctgacttgcccgtctctccaaggatggcatctgcctgttgttcagccattttggcggctgtttccttggtaccaagaccattgaacagcaggttcatgaagatcgccgtgaagctgcctgcaatgataccattaccgagcataatctgagcccaggccggtgcacctgcgaacaactcaggcacaacggtaacacccaggcccatacctacagaacaagcgatgacaaacagattttcatgtcggttcagatcaacctgactgccgataattcgaatgcctgatgataccaccatgccaaacaaggccaccatggctccgccaagtactgcccctggaacgagctgtgcgagggctgcaatttttggtacaaatccaatgaccaccaggattccaccagccaccacaatgacatcacgtgtcttcacacgtgtcatctgtacaagtcctacattttgcgaatacgttgtatacgggaacgagttgaaaatcccgcctaacacaatggctagaccctctgcgcgataaccgcgcgccagatccttggacgacaggtccttgtccaggattttgcccagagccataaatacacctgtggactcggccacgctgacaatcgccaccagaatcatcgtcaggatcggtacaatctcaaatgtcggtgtaccgaagtaaaacggctgaacaacgtggaaccaacttgcatcgcggataggagcaaaattaacctcgcccataaaccctgctgcaatcgtacctacaagcagaccaatcaatactgagatggaacggataaaaccggttgtaaaacgagtcattagaatgataaagagcagcacgccgaagccgagcattagattaactccgctaccaaaatcttctgatccctgaccgccgcccagatcgtggaaagcaacgggaatcaaggttaaaccgatgatcgtaaccaccgaacccgtaaccactggtggaaagagccgaataagcttcccaaagattccggagaagatcaatacgaacagccctgaggcaataatcgctccgtaaatggcagataccccactgttcatcccgattagaatcatcggggacacggcctggaatgcacaaccgagcatgacaggcagccctacgccgaaatatttatttccccatacctgaagcagtgtagccacaccacatgcgagcaagtcaatggcaatgagataggttagttgttcctgtgtaaaacccaatgcgttactaacgatcaatgggacaacgacggctcctgcatacatcgcaagcacgtgctgtagtccgagggagaacgttttgattggatgccgatgccgttgaaaaatacgttcgcgtgccatattagttcgtgccctcctcgtccgcaaatgtaacctgtccatccgacagtgccccgatgcgaaccaatgattccacacggtatcctgcttctttcagcaagcgacctcccggctggaatgctttttcaataacaataccgatacccaccacttcggctccaacctgctccacaatgcgagccagaccaaatgctgcttcgccattcgccagaaaatcatcaatgatcagtacgcgatcaccaggcttcatgaacttcttggcaacggtaatttcattggtctcttgcttcgtgaaggagtagaccttctccaccagaatgtcttccgtcagtgtgagcgacttctgcttccgtgcaaagatcagcggcacgttcagctccaacgcagtcatgatgcccggtgcgatccctgacgactcaattgtcagcacacgtgtgatattctcaccttcaaagcggcgaatgaattctttacctacttccttcatcaaaaccgggtccatctggtggttcaggaatgaatccactttgagtacttgctcggacaggacaataccttcctgtctcaccttgtcttttaacaattgcattgtaattcttccccctgaatgccctccgcacagaagctcacatgctcttccaatcgcatggtaaaaaagcaaaaagcccgccttttcacacgctgcggaataaccggagacgggaaagacggacttgtacgtatatggacaagccgtatggatgctgcaagtgtactggttggacagaatgacaggagttcaatcctgctgtgagaaacctcaaacagtgtaatcagaaacagataaaagccacttgaacctgctcttcagtcaaactgtctgagaatgatctcatgccaaccctacaaaacattgcaacatctttcccgtagtccgatcattccggtgatcaggtagagacatgcaggcctattcctgcacatatacgagtaacggcatatttaattttttggctccatgattcgttacaatgtatgatcgcgaacctgaatgtaaaaggttaaacataactgacaatgttagaagtataccgaatcgacgccgtgaaataaagaagtattttcatggaagttgcggaaacttgtcttaatttgcaaacagggggtgattggaatctattttttatgtacaatatgagaacggaagcgcggatctgaacggagaatggatggaaacgcggcctagattttgaatcgaatgatcaaaggagatatgtaaacatgaaaggcgtacttaacgaattcaaggaatttgccgtccgcggcaacgtcatcgatctggcggtcggtgtcattatcggggctgcttttggtaaaatcgtcacatcccttgtgaatgatatcatcatgcccccggttggaaaactgatgggtggaatcgacttcagtcagaaaatcatcaacctggaccgggatatcaaaacagcaaacggacaggacatcaccaccctcgctcaagccaacgaagctggggctaccgtgattgcttatggacagttcatcaacgtcatgattgattttcttatcgttgcgttctgtatcttcatgcttgtgaagggcatcaactatctgaaaagcaaagaacacaaaaagcccgagccgcaaaaaacgaccaaggcttgcaagtattgcctatcggaaattccagccgcagctacccgctgctcgcactgtacttcagagctcgaagctgaaggcaccggcgctctagcataattacaatgaacgtttaaagacgcaccgagttgaattacggataaatcctgatgtgggggacaacctcttacttgctagggtttatgtatgaaaagctagccatatgggcttcattaactatgggttgcgtagcttaaaggtttgaaggttccaccgtaaaggtggggcctttttttgtgcctatcatacatgtgttacatatgctcccccatgaatttcattcgcggccatgctcataaattagaagcggcgtggcagcaaatgttccaggattgacttcagatctttatcttctttgtaaacttcttccccagtatcaagctctgtcacgcgaatatattcaaagtttgccgaagcatccactggcttaaacaacaattgggactcatcttccaaacgtacattaaatcccatatccttaaacatgctgcttaactgactgttagccggttcctgaccttgccctacaaatataagtcctctaagacttttacgttcctgaggttgcggataaatcacctgaaagtgtacaatgcattccatacgatggttcccctttcgtttaaaacatactttgtgaaattttgaactttaaaatctgctatataaggagatacgtttcatgaccccagaacgtttcgacatttatgatgatcagcaaaattggatcggcacttcactacgcagcgaggtccatgccaagggatattggcaccgttcattccactgctggatcgtgcgtgacgaaggcgagcagcgacgggttctttttcagcggcggcgtgatattaaggatacctttcccggatgttacgacattacagcagcaggtcatctcaccgcaggtgaacaactgcaagacgccagtcgtgagctggaggaagaactgggtgtttatactccattcgaggcactaacctatctactcacggctacacagcaactccaaggagaggtgcgtggtgtcccattcatagatcgggaattcagcgccgtctatggattatgtctgaaccagccgctcgaagcctacgttctgcagcctagcgaggtggatagcctgtatgaagtgccgctggatgatctactcgctttgtttcgtaatgagatcgacgtcattcaagctaccggagttcagactcagccattgatatcaccgccacattccatcggtcataaggacccgtcaagcagcgatcatgcagctgatgagccggaacgtatcgttcgcgagattcgggcaacggaatttgtaccccatggtacagcttattatacggacgtgctggaagctctgtatcacgtgcccaaagagtgatcgtgtacaatcctgttcaacccgatccagttcaatcgaatgttcatagcttcattttctcaaaaatagcataacttcatacctttactatcgacttgactggaaacagatgctgtgacgaacatcactgtcatctctcaaaccagcacaaacaggcgtctgccttcgggcagcgcctgctttatgtacacacgtattcgtttcgtcaagataggtacctatgtgctggcatgttcactccatcagaggtgaattagtcgccgatctgtctagctctggtcaccttctcctgaaggagaagaccaataacgcgcagagagttcttcgtaccggtgcccatagcgggactccagttcctcccccatatcctgttccagttcgtacaacaccagctcttgagcaaaatgattcagcagcagtccggtcattaccggatgctccgtcactactgcctgtgtggcgcatgattcaccgcgcatgcccagcatgcaccagcggcgatcgaccaccagggaaaatttccgaccattacctgtaccatacataggcaaacccggccaagggacaggctgatcgatcatgccttcgccaccatcacacgaccataacaaccgcacaccccgagcttcagcctgttgtaagtcattacgcagcagctctgcctcttcacgccaaacgtctacgacaatctcatgctgagcctcggccaattcacggctcagattctcaaacacatttttgtcaccttcgacgttatagaagacaggcttctccggttcacttttgggcatgctgctctgaacatagtccagcgaggtacgcatttgatcggagatcatacgtgtcatctcctctggcttcagcacactatacttcgccggttccccaggactacaccgcaagaatccacgctgttccagccgttgcagggtcgcatatacattggaacgggacacgcccagccgcttcgcaacctcatatcctgaggctgatccctgacgggcgagttccaccataattttagattccatctcggtaaacccgagatgacgcaaatgatgcagcagttggtccatattcccgtccccccatgctgtcagcaacccgcactgcctcacactgatgcggcagtgcttctactgcatcagatcagatctgttcggcaccacagcgcgggcaccacttcgaccctttgggcagctcggctgcacaaatctgacaattcaccatttcgcgtgatacttcggtctgtacgtccaccgtgttcacgatcgggttgttttctttccagtagcggatgcgttcgtccagttcctgctgacgctcacgttcccgttgcatctcttcatctctgcgacgttcccactcggcatcaaacgcttccttttcttcctgggtaaattccgtactgttatattccgattccgtttccagatccgctatggacggaatgaccgtatggtacggctcgtcttcctccagttccaactcaggtggtgcatcgtagaagtccggctccggagttggggtctgagttacagctgcttcctgtcttgcggctgtggtggctcctgcaactcctgctgctgctactttaggcgctgctgtcttgagttcacccaacttgcgtccgcatttagggcagaagttggcatccagggaagcgacgtgtccacactcgcacaaccgttcgttcttaagttgtgcaatcttgttgcgcagaccatcaatctcgtcctgcaattcgtcgcagagctgcgacagatccaccatctctttttctgcacgcgtcatatcctgtgcccgataaccctcatagaagatgcgacccatatctgtaaaatggacttcctgttcctgttgcaagcccacaatctggttgttcagtttcccaatctcaacggcgtgttgggcacgctctgttgctttgttcgctccgtctttgatgcgctgaagcagtttcatgaccattcctcctctgtcccgtcaaaaccaatattatcatttctatttagtagtaaattagcatattacatctttcatgcaaaatgctcaggcatataacttatacgatatcatgccaaaaagttgcgtaatctcgtgcaggtgcccgttttataccgatactggatgaaatcgggggctttcgtcaagaccatatgttcgggtataatgaagctttgaccatacttaaccgcctgattaggcgactaactctatcataccaatttacaatgcgattgtgaaaagggcaaatggtttacttttagccgggatagtcctatccctgaatgcatacagaggtggatgaaacatgttaagtccgaactcaacgttctacccccgtccgctcggggttaccccggcggcgtccctgccccagtccccgtctgctccgctggagaccagtcggcaactcgtgggcaatgatcaacaggatgccttttattttcgctcgctggaagaggcaggcatcaagttaaacgcaccacaaatctcggcagtccgtcacggcagaggacctattctgacgctcgccggagccggttgtggcaaaacaactgtactggctgcaagagccggctacctcatagaggtcagcggcgtacatgcaggcagtatcctgctggtgacgttcacgaacaaagccgccaccgagatgaaagaccggatcgccgcattgccaggcatacgtccggcagccgcgagagccgtacaggctcgtaccttccactcttttgcgctgacattattacgtcattacggtgtgcaggaagagatctttggcgagtcgcgagcccaacataccgtactgaagatgcttcttcgccaaaatggcatgagtgaagccttccagcctgaaagtctgctggccatgctgtccgcatggaagatgcaaggatcggaaacaaccgatctgcctgaaaaatcacaggaagaacgcgatgccaaacgtgttctgcttggttacgaagcctggaagcaggatcgcggcaaaatggattttgatgatattttactacgggcagccgcgctgcttcgtgatcctgctgttctggggccgcttcagaagcgtttccagtacattatggtggatgagttccaggataccaaccatctgcagtatgaaattgtgcaaaaactggcttccgctcaccgcaatctgatggttgtgggagacgacgaccagacgatctatacctttaatggcgcacgccaggaatcaattttggaattcgataaagtataccccggtgcacgcattgtgacgctggatatcaattatcgtagtgatgcacgcattctgggactcggaagtgaactggtcgcccgcaataaacgcagacgtgacaaacggctacgtgccgctggaaaccgcggcgatgccccccgtttcgctacaccctccaatgcggaggaagaagcagcgtgggtcgtaaaccagctgtgccagcaggttgaagaaggacaacacacctatcgtgatattgcgattcttcaccggacagccagcagcagccgggctgtattcgagcagcttgtgttgaaagatgtaccttttgtacagcatggtgcttctccggtgttctatgaccagtctctcatcagacccctgatggatcatctgcgtctgtccattgacccacgagccatggatgctcttccaagtgcactgggtccgctctacgtctcacgcgatgcgggtctggaatggatacagcgttgtgaacaacaacaggcgaagaaatatccgctcatccatctggtgaaatgggaaaagctgaaaccatttcagcaggaacaggtcaaagaacgcatcaaactgatcaaatcactgcacaaactaaaacccatcatcgccattcaggagatgcgcaggcagttctacgacaagtatatggaaagtggtgatcccagcatcttcacccactataaggaaacgatgctggaaactctggatgaattcgaagctgctgtcaaaaaattcgaaacggtagaagagttcatccaattcgcggatgagctgtcccgcagacaccgtgagatggaatctttgcgtcgtgcgcaggatagtgacgcggtacagctgatgaccattcaccgggccaaaggactggagttcccttgtgtgtactggatcggagccagtgaaggcattgtgcctcacagtaccgcactgcgtcaggatattcctgaggatcagaaagctgcgcttgctgtgcagcagacagatgccgaactggacatggcgctggaggaagaacgcaggctcgcctacgttgccatcacacgggccaagcagtacttgtatgtcacctcaccggcgagccatcacggaaaaccagcggatgtgtcccgtttcctgcttgaagccttcggcatggaagtaccggacaaacgcaaacctcgtgaggagagccggacgagcagtcaggcttcatatggtaaaggcaacggacagtatgcccgctcgtccggctcaggtgcccgttccgaaggtcgggatgtggcacagcgtcgtgccatcagccacagtgaccgtcgagactacgaggtccacaacgaacgtgatgaggatcgcctcggtgaacgacgtggcagtggtgagattcgcaaccataaggcgttcagcaccacaggtgtaagtccgaaagctgcgagttcctccagttctcagtcgcacacttcaggttcaggtaatgctgagcgtacggagaccgttgcggtctggaagtgcagttcatccacctgtaaagcgtggctaagacagaagccagctgtaccttctaaagcaaccaagaaggcatcctcaggccctcccgcctgtcccctgtgttcaggatcgatggaggccggtacccgccaggtgccagtaacggggagatttgggaaataactcaaaggaagaggtcccttatggagttagcgatgaaccatcactcgtgtcatggctggtcatatgtgactgaacatgtggatgagtaaataacacacgagcatggtagctcgtttcagggcgctttttgctgtttattaacagtagaagcgtcttttttccatttcagaatgggggttggaatatgcaggacggcaaacaacatctgtatgtatcggtaacacataatcttattgagcaaacaaagaacgaatctacaccctttgaggtgttggtggatgacgaacagttgggccgattgaaagatctgatgaaggtgctggaggatgacgatgcctatacattgcaacgggctccggtaccctacaaatcggcagaccatgatgaggcaacggagcagttttcggatggcatgaccttgctgtacacctttctgtatgaccacggcacgccggatacccggcaggcaattgaaaccatgaacgtgcttccaaggctgcaggatacggattatgatgaccctggatacgagaattcaccactgaataaatgacctgatgccaaaaagcatgcgtaaccgcagatcacgcggaagacgcatgctttttaatatgccgaaggacaactgccatgtaaaatgaactcaatccagacgaatctcctgccctttctcagcggattcgtagattccgcacaacatgcgcgtggaagtcacaccatccgcaattgggctgatcggctctgtaccgttcaggcaacaatccacaaagtggtcaatctggttctggaatgcactatgaatatggagacccgtattgtccgtctggggttcaatattcaggatggtattatttttctccgtgacgatcagtgtctccggctccagttcgaacccaccacgctcgccgtataatttcaccgaagattcatctccgcgtgcatgcagggtaaagctcacatccaccgccagcgaagccccgttttcaaaccgaatgagcgcattcgccatatcttctacgtcattcacagctgcgctgtagtcggctgctttgtaaaaagaaagatgttcaatatgggcacgattgcccaacttccgatacgtattaccactgaccgaaacaggtttcggcctgcccatgaggtaccaacattggtcgataatatgtacgccgagatcaatcagggggccaccgccggaacggcttttgtcagcaaaccaaccgcctggattgccgtgacgccgcagaatggaggctttggcataatacagttcaccaaactccccggcatctatgaatctgcgcatcatctgcatattgttatcataacgccgcacaaaaccaacgataaacgtacgtccgctcttcttcaccgcttcttcaatccgcagtgcatcttccacattggttgcgaccggtttctccagcaacacatgcttgcctgcctccaatgcagcaatggcaaattccgcatgtgtattattccaggtacagatactgacagcatccacatgcgggtcctccagcatctcccgataatcggtgtacacggattgggcatcatacttctgtgccgcagctttagcccgttcttcgttcagatcgcagatcgcatagatgacggcatcctcgtttttggcataacacctcatatgaagatccgagattgatcccgtaccgatcattccgatgtgcaacatttgtttcgtgctcatcatcgtcctcccttccttttccacagcttccacaacatcattatcgtctagtctgcccgcagcatgccttcgtaaatacccggcgttgaattttcaatcttcacggcacccagcgtccgggcatagaaatccacaggtcccgctgatccgataatcgcatacccgtaaccgtccgccttcatcgcatgcatacaggccagtaacaaggctgtgcctacacctttgcctcgtgcatcctggctcacaccggtcggtccgaagaagttgcgacatgtcgcttcgtaacaggcaaatccaatcattttcccatgctcaaccgcaatataacaggacaccggctgacgcgcaaaagcgacctcacattcatccacccaagcctgactaaaatgtgacctcacccaatccagtacaagctgtttctctggggcaatggctcttcgaatcacaatggaggattcctccaacgctctcagtccactctcttgctccggcaaacgatagagcgctaccaacatatcactcatctaatccgttcctcctcgtacttgaatgtgaaataggacaaaggtttggccacttacctgaaattaacctgatcctgctgcggataacctgcaatacaagcgatatttctaatttaagctaacctaccgcttacattcattgcatttcaactgcaacacttagacgatttgtcccgtctattaacttgaagcgcggccctaaggaagattttaccgcgtcagtacacagattagaagggatgaatattgatgaacaacaacatgaaaaaagtaagtgcactgatggccctatccatggcattgggtggtggagccgcttatgcagcaacactggacaacacaaaaccagtccatcaaacatccgtttcagcagatagtaacgcagtgagtgtagtaaacgtatccgtgaatggtgcagccatctctgatggttattggaacaaagatggcaaagtagccatgatcccgctgcgtgatcttaccgacgcactgggtattgaactggaatggaataaagaaactaaaactgcagagctgactcgtggtgctctgtggacacaggtaattacaggcaaggatcaatattccgtaaataatatgtcgctcacgctgggcacagcgcctgaaatcacaggcggcactttgtatgtacctgcttcttttgccgaaaaggtactgcatggacaagtgaacacaacggggaatcaagtgactatctccagtgaagaggacgtgaagacggttactgaacgtggtgtaattaccagaatctcgaaccaagataaatataagtccatccagattggcggtgcaggtacggatggtattgtgctcaatctgagcgatgagacaaaattcatctcagttgaggggaaagagattgcactgactgatctggccattggcatgaacgtggaagctgagcattccctgatcaccactcgcagtctgccaccacaaacaccgacatatacagtcactgtactggatgcagctacagcatctgaggcacaacctaaagagcttctgggtacagcgggtacaattgaaaatgtaacaacagctgaaggcggcatctcacagatcgagattacaggaacacggttaacagaaaccgctcctgaccatgtcgtgctgaacattgctaaagacacgatgatcgtgaaccacgaaggtgaaacggtgaaagccgaagaattgaccaaaggcgctaaagtcattgggttctacagccctgtgttgacgcgtagcctgcctccaatcggaacagcttggaaagtggttgttgaaacacctgcagcagaactggaagcgaaataatacgattggaaaaccgtctggctgaaacacatgttatatgttgttgcagacgaccgtgtgcatcgcttagcgcggggtcatgagtgtggagcatcataatgaccagccatccgcatgtagctcctgacgcgcggtgtaatgagtttggcgcatcaagaactcagccgtgcggccaggcggcgaagtcaattcaaaacaaccttatccgcttgtcttttgacaggcatggataaggttgtttttttggttttggttttttagagtgtgtctacaaactgcttcaaactgaagggtatctgaaacttgtccggagcagacacatgcgatgtgcactgcatacgaaatacattgcttaccgaatgtaagagcaagcggagttaacgctaacgaatctgaggcatcttattcaagaatttgaagtacccgcagaaatctaaggaatctcaggcacgctatgtttgaataaatagctgtttatagcatttttatcagaggaatttgggaaataacgtgtctgaagttctttacattttagcaagaggacctgagggccaaataagacgtcctgtgttccttagaaaatcttccggataaccgtcagaatcaatcggcttggacttcatcttcaacaatcgcttccacttcaatctcaaccatcaacaagggatcaatgagtgcgctaacttcaaccatggtggctacaggctggatctgtccaaaaaattcaccgtgtgccttgccaacttcctcccatctggagatatcggtcacaaacatccgggttctcaccacatgcgacatgtcagcccccagttctttcagtgcattctcgatcgtctgcaaaacgaaccttgtctgtgcatacggatcacctgccccaacaactacaccatcttgcatcgcggttgtacccgccacttcaattcggttccctacacggatggcacggcaatatcccaccaacggttcccatggggagccggtaaaaacctgctgtctgctcattctctcgtccctcgctttggttgtatttgtctcttcagattaaacatgaattatatcagtcccccatcatctcagacaatggaatcaagtttaattctatcttaactccattaacatttttgcacagaaaaaaatcccctgaatgactgcccattggttagatcaaggacgcttcattcggagatttatgagaattagtatcttgtctttttctttaaggatgaaacatccaaattacaacttgatattagcctcatcgaagtattcttccagagttaacccactcttcgccacatccggtgccaaatctgtaccgatgtaccggatatgccaaggctcatagacgtaacctgtggtatcttcttcaccttgcagataacggatgacaaatccgtattctgcagcatgttcagccaaccactggccttccttcgatgtgccaaatacctcttccagcacattgcccacactcggactcgatacatcgatggcaagacccgtctgatgttcgcttcggcctggcacagaactcacacgatctgtgtattcttgacctttggttttgacattattgttatagatggatacctgacgctgatatgaacgataaccggacaccgcacgaagctcaatgccatccgcttttgcacctgcaaacaacttctccagagcctccgcagcttccttgcgcatatgccgcttctcgtgtggttcgtcgaaggagaacggtacattcggctctaccagatcgtccggctcgtacccgtcgggcagactccgttgcttgttgacaatgacggtcatagactcggcattggtcaccacggattgtgcatcaatcgtcgtttgcagtgcgctgatactgcgtttctccagcaatgggtcttccgctgtcgccccgttaccattgtccgaagagccctgctctccgcccgctgaagcattcccagactcgctatccgtgccttcaccgctgttgccagaagatgatgtgtcatccccgccagcattgtcgccatccgttcctttatcctccgtaaaatgaaccgttgtgccgtccgtctcctgttgtgtgttacctgttccattcggattctggctttcctctgtgcctgaaccgttctggcacgcggcaagcaatgctccgcatatcatcaatgaggacagcataaccaccatgcggcgctgtcttcctgtagttgatttcatgtaaaaactcctatcgcaataatataaatgttatatagttctcagcgtgcaatgttccctgcgacagtataccttaattgggagcgaagctccaccggtaaagacctcctttagaagagatccgaatgaacatatacgggctgtacagcctgtatgatcgttttttggacttttagagcaacatccccgtgctgtacacaatagaattgaaatgggaatataccttcatatatccaatatgcaaaaaagtgattataccgagatgcactttattaatgagcattagcattgttggataaagacaaaattcatcttgtaccgggaaatgaattaaatcaaataatgcaacatgctgcaataaaaacaagcaggggtgatctgagatctcccccgctctgatgggtgcatcatttggttgccgggctgtccgtcttcttctggacagcctgccacatccgcgcggctacacgctcgcggatcaaatccagccctgcggtggccggcacgcccggcatcagcgccgtcagctccggcaaggccggcggcttgcccggctgcgcgaggcgcacctcaacggcgccaaagcccggccccggctggtgcatggcgccgtccgcggcggcctcggcgatccactcgccgacggcagcgccgccttcgccgccccgcacttgcgggcggccagccatttccgctgcgcggccggggccgctgggatcatgggcgagttcctccgcccatgcccccagcacgccggcgagcagcgcttcgcgcggcaggccggcgtgcgccagctgcagcagcggctcggccgcgaggcgcgcggctacggcgcgctcagcggccgtggcatgcgcgcagcccgggcggccgcaggtgcatgccacggccgcgctgaccgttgttgcgcctggcgagccatcgggcgcttgcgtagccggcagcagcccggcgagctcctcggacgccgggccgccgcgcaacagggcgtacagcgtcagcgggcgcttgcgcaactgagccagtacagcctcgcgctgggcttcgctcagacgcgcgggcgttcccgtgaccgtgaacatgcctgcggccgatccggtcttgccctcaacagcggaagcggaaacggaaacttcctggtccgcttccgctgctgtatttacttctgctgtccatccaccgggggacatatgcagctcgatcttccatttttcgctcacaataatccccctttctcaacatctatattcccctgaatgttcaaggtcacagccacgtctcaccctgaagagaaatcaggccacgcagctcatcatccgacatctcggtcagccaattctcacccgaaccaacgacctgctcggacagtgccttcttgctttcaatcagctcatcaatccgttcctccagtgttccctgacagatcagcttatgcacctgcacattgcgattctgcccgattcggaatacacggtccgttgcctgattctcaaccgcgggattccaccaccgatcatagtgaacgacatgactcgcccgtgtcagattcagacctacacctccggcacgaagagatagaacaaacatggacggcccctctcctttttggaaagtctccaccatatcgtctctttgcgacttcgatacaccgccatgcaggaaataaggttcttcctcgtatcgctgtttcaacctcgacactaatagatctcccatggcaacatactgcgtgaagatcagggccgattccccgttatcacggatggcgtccagcagttcaagcaatcgttccatcttaccggatgcctcagccttgccgtggtctttccgattgctgtccgccagcaccggatgatcgcagatctgcttgagcttggtcagagaggacagaacaattcccttgcgggcgatgccatttctgccatccagaccacccatcagatcatccaccacacgctgatacaacaccgtctgctccggcgtcagagaacaataggatttcagttcaagcttctctggcagatccttgcgaatatccggatcacttttcaacctgcgcagcatgaatggagataccaaacgatgaagctcacgcaaggatgctgcattttcttcggatggccccagtcccgtataacgctgacggaacgatgaagcggtgcccagataccccggattgagaaactggaaaatcgaccaaagttcgctcaatcggttctctacaggcgttcccgtcatcgcaatacgatgaagtgtagacaggcgcatgacgctttgcgcttgtttggtacggtagttcttaatatattgtgcctcatccagcacaatggtggaccagtgcaatgaagccagatccgggccatctctgcctgccagatgataggtcgtcagtacaatgtcatgcgtctgcgcttctgcctgaaaatcatttccgtgcagccgttgtccgccatgatgaatgtacagcgacagatccggtgcaaaccgcttcagctcacgctgccagtttccaagcagcgaggtaggacacacaataagtgcaggcagatgaacaggctgctcattcgtgtgctgatccgccgggaaagaatgatctgatccattcagcagctcattctcacgggcttcctcttcagctacctggcgttcctcgtgtttgcggtctagcagacaggtaattacttgaatcgtcttcccaagtcccatatcgtccgcgagacatacgccaaagcccagctcacgcatcgcggataaccattggtagcctcgttcctgataaggtctgagttcaccatgcaattctgccggaacctgacgaggctcaatgctgcgaagcacctgtccatcgagcaggaaagcaagcatcccatcagattcggcaccgaagacggagaggcccttccatgcggaatcctccccttcatccgctgccagatgcagccattcggagagaggcatatattgttcttcttcttttttcatataacgcaggacttggcgaatctcttttgtatccacttcaatccattcaccacggaacatgacatacggaactgtggattcagccaatgcagccagttcctccgccgtgaccggtttaccatctagcataggctccgctttgaaagcaaccaattgttccatgcccagtgccgatgtggctccaggcaaccgttctgttccccgattcaacatctgcagacgcagtcccgcacgacgtttcccggcacgactccaccttgaaggcatgagaacggttatcccggccttctgcaaacgtggaaccgcatgcgtgagaaactcaaagaaaccctgctgctccagcttaatttcctccggacgagcggtaagcagcgccgtctccagttcaggtgccatttctgctgcttgcccgagtgccatcaataattgttctgccgccgaggtatataacaccttcccccggtccagatctcgctctggatgtgcccagatcgtccgtgcaggcaacctcaagcttggttcttgctcactgtccgcccaaaagctgatcccccagatcgtttcatgttcgcccagcggtggctccaagcggagcaccagcttcaattggccttcagcaggtgccatctcttctgctcccacgattggcattgacgttccaccaacttcttgcaacgtatgaataaacgctgtcatatcgtccgtcggcccttgcaccgtcacaggacggaacatcgagatcagactgttccaccagagttcggctactggcgaagatccgcgtcgatatggggtgcggtaacgggacagttcactgtccatgccctccagttcacttgtcactacagcatgaatcatgccactcatgaatgaaaataataccgcagcccctgcttcttcacgcgtttccggttccaatgaagcataagctccaggagcagccaatccaatcggaggcatcgcttcagcaagatcgcggaagcgttcgatgtcctcctcctgctgcaagcgtggccgccatacacctgttaatgtctcttgtccggtccgtcgccgtgctccggtctttgctgcgaattcagccgatggagcaattgctccccgcaacagcagctcctgtgtgaactgcgccgccttgatccagtaacgcatctcttctccaacctgaattccggctgcatttaacaaacggtcatcccattgcagcagcagcctgaaggcatccttaggcgagactgccaatccttccaatgtgcgtcccagcagttgacgccgcttcgtgttcttcgcttcagccgtgttccttagcggattcggccagcgcagctccgcaagacgcagagcggcaggctgaaacagacgacccccgtcgccaaaattcaaccttcttaccacgtggctccatgcatccacacgtggttccgatgtttcaccggaaaaacaaaaaaatacgtcaccaagccatactccatacagcgattgcatcattaaagtctcccgtcatcccttcgcattgttactctccatcatatacgaaaatgaccggatttaaaaacctttgcccataaaaagtggttatttcgatggttagggcgtgtctgaaaacgccctagcggcacaaaaaaatgtcccttctcccgaaaagcggatgaggaacatttgggtaaaccgaaggataatactgaatattgaaagaattacggatcgttatactcctatgatctgatcaagctgcccagcaatacatccaggttcaaaatacctgcacgatgatcttcacagaacccgattttgtcaaaaacgccaagcatgaaacgacggtgttcctcagctggttcctcgaaacgatcgtaacttacgacagaatcgaccatatctacgatcagcggtacaaatccacctttgtaaggcaccacaataatacgtgtagaagtggtatcctcctggtctggcatgcctaacaatacacgaagactcaccaccgaaacgaccttaccgtacagcgaagcaaaacctcggatctccgggcttccaaatggaactgttgttacctgtaccattctgatgatctcatgaacttcatcaattcgtagtgcaaagatctggtctcctaccgaaaaattaatatattgcattccctcgtccatagttatccccatatcctctcattccgtataatcagactactttcgtcccattagatgttactttggtgtatcggttatttttgatcaaatgtttaggcttcagatcaattttgccaacttcaacagacgttgcattacggttgctgtctccgctctgttcatttgccctgctgtggagggtggtggaagttagtcgttttaatattgagcgtaagtaacctgacatcggattgaaaaattatattcaaaaaaaagaccaaagatcagctttatgccgatttttggtcttttttatccccatatattatggatctgtttctatgttttcaaatacttggaacaaaaaagcgttattactgtggataacttgtttaattactccaaaacgactgttttatcgcatgaaaatacgagttatacctgatttgtggataagttgtgcacatattgcacacatgctgtggatatctttagcatttcatgtggatattcattaatttaatgtggacatgttgtgtatttgtttgtaaatctgacgtaaaatccgaatttccgcttcagttatccattactgtggacacgttgtggacatgcccaatttccttcgctgtagttattcgaccaattcaccctgacgcatgatcagcctgtcatcgatgtacacgtccggcttttgtacaactgcatcaatatgaacacctgcggcaatcgttccaccaaatgtgttattgctgccaaaggccacatgaattgtgccgtacaccttctcatcttccagcaccacacccgtgattcgcgccttgttattggtaccgatcccgaattcgccgagaaaacgaccatcgccctcaccaagcgtttccagtaattgagccccatctgttccttcggctgacaccaaccgtccttcactaacggtcaataacatcggttcacggagtgccccaattccagcaacggaaccatctacaacaatactgccctcgcccttgccctcaacgggagcaatataagcttctcctgacggcaagttgcccgattcaccagggttcaaatacatacctgtgcttggtacaccgttacgatcttcaatggaaaaggaaagactatggccctgcttctctattcgcacatggcgacctgcggttaatagagccgttaccttctcggtcaacgcctttacttgcgaatattcagctgtaatggctccgttcacaaacatatcctctgtcatgccgggcatggttgccactcgggtccctgaagcagcggcttttttgcgtgcctgggtatgtgttaatgagtatttcgttacacacacggctacatctgctcgaatcatagcctctgcaattggcgcaggtggctcttcgccggatctgctgcgttcctccatgattaacaggactgattctgctccaagtgctttgcctgcctcatagatggattcagccagatcccgtttcatatcgtctgcgataactaccagattctctccgctgcgcagtccgagacattccgttagcacatttttactgatttccacacgttgcttgctcatacattcatctctcctgtctttggttcagctctcaaaagtcgacttgaccctttcgacaattggcacgggattcctgcatgtccaaacctgaactcacctcaagttatcggcccattcggcgaggattgcagctgtttccttataccgaaacgtcggaaagtaatgtccataggggacatctatccgtttgacctgtgagttcatatcctggggatagtgatattcctgatcttgattggcccacacaactaatacattcttggcataatgctgactttccattttcgcccacaacgttgatctggcgcctttcctctgacccgagtggatccagcgcaacaagtctgcatgtgctcctgcaatacgaggggactggagactggagcgtattctcttgcccatggcctcggccataacactgctgtcgcctacgccgctatgtgaactgaacatttgattccaacttttctccgatctgccacgcagcagggagcgcatcacccctcttggtaaacgggaaacccatcttaggacattcggatttgaattgttggcaactggctggagcaaccccagtcgaatgtctgtccgcccgctacgcatctgtgccgcagctgcaatagcagcaccgatcgaatgccccaccagcttcaccggaccttcaaactcaccaagagccgtaagcagtgcatctacctgaccttcaaatgcttcatccccctgatgcaccggggaccgtccgaatccggcgagatcgattaaccataccgggttcccggtccggtccctaagctgttttcctaacggcaacatctcatccgcagattgaagcaaaccatgtacaataatccaaggctctccctcgccctcccaaccaagcatagccatatttccgctccgtgaccgaatataatctgtcggaaaaccctcaggtaccggcgtataccgaaaacgatagtccagatcggctgtaaccagcggaagctgttcccggatgtccggccaggattgccccatacgtgtcaacagagcctccgtctcttcaaccgggaatgacctgttggtaataaaagcaaccgactccgctggaacaccactgatgcgtgaaccacctgatttcatgatccattgaatccatggtagtggcacagcccctttcggcttgggtacatccaattgctgcgccaagagttgcagcagttccttcatatttggactgtcttccttccgcgccaacagtggataagttcctccgactggagcagcttccctggatagaaaaacaagcgtctgtgcaacaatgtcattctccacaagcggtaaccaataggatgaacctcccggcactaccggcataagtcctttctgaatcgcctgaatgagcagcccaatcccacccgtttgctcggtttcaccggtggggcgtggtccaaccactgtactcggatttacaacggataagggatagtgatgctgttctgcatgctcgcgaatatgtagatccgcatgaaacttcatctcttcatatgcactttcattgttgtccacatgctcaacctgtagataattcccctgttcattccgctctccataaggactcatataaccaacaacgtggataaagtgtctcaatccatgagtaccgtggatttcctgcgctagctgtgccacttctctggccccgttcatgaatatctgctcagctacttttcgttccaaagtgacgtccatcgttccacccgcgtgaatgatcacatttgcttcaagagcacgctcccgatctactgcggtaacgccaagacccgacatggataaatcacctgtaataaaggtaatccgcttgaaatccttcactccataagccttcagcacagttctggctcgctgttccgaacgaaccagcaagagcaattgtgcgtctccctgcgtgagttgtttgaccgtttctttgccgataaaacctgtactacctgtcataaaaatggtcgtggctgcaatatcagactcgcttattacctgattcatgtttgttgaatgtgctgctgtgttttcttcattggataaacggttagtatgtacaatcattctgttacggctccttttagtactatatagtactagttatattcaaaaaaagagcttcgattaacgaagcatctgacaaaacgtacgtgccgattgttctataatcccaacatcacgggcagttcccgctaggattagcgaaccttccagtgctgcaataaacaacaacgcagccggtcccggctcgatctctttgcgaaattcaccgcgatccaaaccttgctgaaacaacttctccaccatcggtctaagctcacgaaagaatctggatatgctttccttcacttggggtgcactgtccggtgtctgcatatataacgtaacaaaaggacagctcccttcgtaatttcggccctcaatacctgccgacagtaatgccataaacgagtagatacgctcctccactcctcgctcacgctgactgagcagcagatacagctccgactcatactgggcaatccagtattgtaccacggcctggagcagttcctccttgtttttaaaatgataataaatattcgacttggataccccactcactcgcacgacttcatccatgctaacgtagctgtacccctgacgcagaaataattgtgccgccacttcaactgccttggtccggttcaccggattggaacttttggatttggcgggtcccgtattcatttttgaatttgtcatatttagtactatacagtactaatcagttgaaaacaagtatttctgttaacaaaagaggacctcccactccaactactccatacttgtccacatttagagtgttatacacacaggatatccacatatagtattaactctgtgttaaatacgtcatgagatttttaaattactctcgggttatccacatttcagggatatagctgactttgaacttttcagagagcgtcattggctcctcggaaaaacaaaaacaggccaaccagaataagatttctggctaacctgtttcaataggctaactttttctttggtaacctgtggatactagttaatttggataactaccctaaattgaagcttcggtcggatcatcctttttaatcaatatgaccagatagtataccgtccatgatccggattattttttcagactatcccagttctgttgcaatgcgtcgagcaatccggctttatccgatttgcctgcaacgtaagcctgaatcgtgctaccatactcttgtggaaccccttcagggaaacggttgaagttccagctgagtgttttattttcctggctatacttcatgatctctgtggcgaggtcacccagatcctcttcggatgccgtgatggaactgaacgccggaatgaatttgaattcttttgtcatgtattgtttcccgatatccgaagttacgagccattccaaaaactcttttgcttccggtttcacttgggaattcttgttcacaacccaatagttcggcacgccgacaaacaatttgtcattgggttcattgttaattggcattgggaggatacccagattcagatccggatcgattccatcgatctgtacttgagtccagttcccttgttgcatcatcgctgcttctccactcgcaaacaacgtaacttgcgtattgtagtcggttgtcagcgggtttttgttgctgtatttcagcgttaagtcgagcaagttgatccagtcggcgaacacttggttgccaggaattttctccgtactttcgttaagtccctggatgaacttcaccggatctgcctgatttgcaaatgcgacgtttacattatggttacccagcacccaccactcctgatatccattagagaatggggtaatgcctgcggcttgaagtttctgtgccgcttgatccaattgttccagtgtcgttggaatttcggtaatacctgctttttggaagaggtctttgttataaatgaaaccataaccctccagcgcgagcggctgtccgtagagcttgccgtctttggtcattggctctttggctacttcgagtgcatccttggcccatgattctccagacagatcttccagatattcaagccatgtatccaattcacgataaccacctacgttgaaaatatccggttgttcgccagcggcaaacttggcttttaatgcagcaccgtagtcactgccgccacccacagtttgaatgtccagtttgacgcctggatgggaggattcatattccgctttgagacggttgagcgcttccgcgatttcgactttgaattggaagatcttaatggttttatctccagcagcagcctcgccaccaccttgagcatccgtgttgaccggactgccactcttgtccccattgccacaacccgcgagcattaccgaaaaagcaatcagcataagcaacgtcaactttgtcattcttttcatacatacactctccctatagtagtttcagtataaccgttccactaatgaatatttacactggcactccgatgacagaataaccttcccttgaagcgtgttttcattctaacgaaccgagcgcaagctattcgcacctatttgcacaggttcccattctaacgaatcacagcgacgttatttcgtcgatttggtcgaattttaagcctctgacgctgttttgtaaccgaataacgtttaagagattcgttacaatttgtattccttgattatccacctattaagatgcggtggattcgttagcgctttgaaaaaggagcataccctcacttcactctgcagaagaagttcctggctgtacaagcttctttattgctcctttctctttatcgacgctttcccttccctaggagtcatgccaaagctatgcgggcatgactccctttgcacacctccatgcgaggtgggagcaaagggatcaggatgcgatggaggagcggagcgttcgcctttgatactcggtggcttccttgccctaatacattcaggccaccgaggagcaacagcgaccgaaagcgcaacttgatcccgcagcgacctgcactcgcaccctcaccctttaactgatccagccgtaatcccctgaatgatgtacttctgcatcagcaggaagaaaataatgatcggcataataccgagcacaagtgctggcaaagccagatcccattgcttcgtatattgaccgaagagtgcaaaggtcgcaatcggaatcgtacgcaggttggagctttgcaggatcagcgatggaagcagataatcattccagatccagagtgtgttcagaatgatgacggttacatacatcggtttcatgagcggaaatacgatccggaagaacaccccgtagaccgagcttccatccacccgggccgcttcctcaatctccagtgggacggatttcacgaatccgtggaacaggaagacagacatcggtgctccgaaaccgagataacagataatgagaccgccaaggctgtcgatcaatcccagattactggttacagtaacaagtggaatcatgatagactggaacggaatcaccatcgcggcaatgaacatgccgaacaaaatacggttgaaccgggtatcgctgcggaccattcggtacgcggccatggaactgatcagcacaagcaacagattgctgaccaccgtaacgataagcgagttcatcagcgcggacgggaagttaattttctcccaggcgttagcatagttgccccactgaaatacttccggccaagcagccgaattggtgagcagatcaccgaaggttttgaccgaattcacaaacaggaagtaaaacggaaccaggaataaaagtccaaggagtaccatgactatctcggttacaatggtactgaagcggtaatttttcgtcgtctccattaggcttctacctccttgctcttcgtcagacgtacctgaatcatggtgatgatggcaacaattacgaagaacacgagtgctttggcggttccgatgccatatctgttatttacaaaggcttcattgtaaatattaagtgcaaccgactctgttgatccgaacggtccacctttggtcagtgacagattgagatcgaacattttgaacgaccaggagatcgccaggaacagacagatcgttacacctggcataatgagcggaagaatgatgctccgcagtacctgccagcgacttgcgccatcaatctcggcggcttccagcagatcaggggatacatttgtcagagatgagatgtagatgaccatcagatatcctgcggtctgccatacaaacacaatcacgattccccagaaggcggttggttcgtctcccagccaaggaaggttgaagaaggaccagccggttacatcgcctactgctgaaaaccctttcacaaatatgaactgccagataaagccgagcaacaacccaccgatcacgttaggcataaaaaagatcgtacgcagaatgtttctcgtcttgagcggtttggtcaggaaatacgccaggaaaaaaccaatcacattggtcagtaccacaccaaccacggtgaagcgtaccgtaaaccaaaacgccgtttggaacttgggatcattcgcaaaaacatgcacgaagttatcgaaccctacccaattaatgttctcggataccccgttccaatccgtgaaggaatacaccatgccaagcaggaaagggaccacgatgatgagaataaaaaacacgatggagggacccacgaacacaagctgctgtaacagctgtgaagatttgcgatgcttcatatcgttctccccttctatagatggatgaaattggtctctttttctattaaaccccattatcgccgagggaaacaccgacccttgtgaacaattgggggtaaaatattgtcctctctaaacctgcaaccagaaggggtgttccgatgtccaaatactacagtatacgcaccaaattgattgcctttatgctcattgctaccacccttccgctgctcgcatcgatcagcatgacgtttatccagaccaaaacggccctacgggaacaggctgtggaagagaacaaacgcctgatctaccaagcgtccaccaatctcaataactatgtggataacgtggccagagcgtcgctcgctgtgtataacgacccgaactttctgcgtaacttggcaaaaattcctggggattatcgggcggttgccgaggtgtacaccactttgcagacgatacgtgcggctgtgccggatgtattccagctgtatttgcactcttttgccgccaatcaatccaccttaattacaaatccctttccgaagcgggaggaacgcaaacaggcctattccggctcgcttcatggaaaaacaagcggtgacagcccggatatctgggtggaatcggcccatatgagtcacacgtacggattcaaggctgcctcccccgatgaccctgccagaacggtcattaccctgcatcgggtgatcaaggatattccgtccactgagcgtctgggtgtactcgccattgatctgaatatgaataccattgcagcaatctgtagcaggctgtatgatccggctaaagaacagatctatgtggtggatggtcagaatcagatcatttaccaaggacgttccgaggtcaatcatacggatgcactacgagaggaaacggctagtgaactgaatatcgcgcgatctagcgcaggtacagcccagaacgttgcagggcattttgaacaggatcgttccatgtatgtataccagcaacttggtagcacttacgccgattggaccatcgtcaaacagatcccaaatgagacgttatatgccagagccaccacacttacgtggaataacgcgatgattgccattgcggcacttgtattggtcattgttgcaaccttgttcatctccatccgaatcaccggtccactcaagcaactcatgcggtatatgaaccagattcaagccgggcgtctgcatgtggatatccatctatccagccgagatgaatttggggtgctcgctcgtcatttccgggatatgatggatacggtaaataacctgattttgcgggaatatcgactggaaatcgccaataagaccaatcagctcaaagcgttgcaagcgcagattcatccgcattttctgtataatacactgcaatcgatcggtacacttgcccttcaacagcaaggacaacgggcgtatacactactctctagcctgtccaaaatgctgcgctacagcatgcgggatcagacctgcgtgaccttacgcgaagaggcggagcatgcccgattatatctggaactgcagcaggagcggtttggtgaccgccttgaggtggatttggattttgccgaagatacactgtctgtcgaaatgccaagaatgacgttacaacctttaattgagaactacttcaaacatggggcagatattcagcctggcaaaggtcacatatccctatccagccgccggatcaacgatcattggattgaaatagaactgaataataacggcccctccatacctgaagataaattactggagatccgcggatggctgcatccaagtcatacaacaaccgggttatccacacaagaatccgacgagtctgaatccatcggtctacgaaatgtaatacgccgacttcaattgaactctcatcccggtcactcagccaggcttgagatcaacaatcaggaacccaatggtgtgaagatcacggttaaactatacgcgggagagtgaacaacatgaaggcactgcttgtagatgatgaaaaacatgtccgcgatgccataaggttgcttggtcattgggaagagtttggcattgatacattacttgaagcagcagacggggatgaagccatcgccgccatcacggcacatcaacctcaaatcatactcagtgacatgcgtatgccgggcaaggacggtatggcattgcttgaatggatatcggctcataccccgcacagcaaggtgctggttatcagtggatatgatgattttgaactcgtgaggcatgcaatcagacatggtggcatggactacctcctgaaacctgtggaagcagatgagctgaatgcatctctattaaaggccgttacagcttgggaagaggaagacgccattcggatacaatccaccaggcaatccattgttgttaatcgaatgcgcccccactaccaggatcgtctgctcaccgaacttgccgtcggaagaggcagcagcccttcacacatgcagcgattgcaggatgagttaaatctcccctgtctaatccctgtctgtagtgtcgctgtcaccagcctgtcccatctggatgcagattgtctggcaaaataccgcagtcaaccggacctgcttgtgttctcggtactcaatatctgtgccgagatgttatccacaccagacgaaggcgtaatgtttcgccagttggatcaaccggacgagattgttctgctgcattggggtccatccacttcattggaacatattctggacaaggtcaattatggattggagcagacgattcagcgtcggcttcattttgggatctccacctgtgagtcttatcctggcggaatctcagcggcctatctggaagcaagttcaaggctgtggcgacgtaatgctgtgcaaattaaacagcgaatccatgcctcagtggaatcatcaaatggaaataaaatcaggcgtttaaccgcccatgaagaacccctgcgtatggcagccatgagttgccgggcttccagtgtatctgctgcggtcgccgagtggcttgacccgattactgatcttgaggttgtcagtgctgagcagatccagcaatggatcgatgagctggaatggatgctgagccgctggcttgatgatacggcaggttcgtcattcaaagaggaagaaatgacggaggaacagtctattccctttgccgagttacctttggacgctgaaggactgttatccttccccctgcttcgttcattattggaacaacgactacttgccgcaggaaaggcgctcaccgctcatcaccacgccaatcctgatcccatgagtgagattgcacgttatatggacgcccattatcaggaagacctgtccttacagcagattgccgcgcgtttctatctgagccgggagtatatttcacgcaaattcaaacagcaatttggtctgaactggtcggaatatctgggcaaactgcggatcaacaacgccaagctgttactgcaaaatccttccctgcgagtcgccaaaatctcggagatggttggatttcaggatgaaaagtatttcagcaaagtgtttaaaaagatggagggcatcacgccagcggaatatcgtaaaacattattggaggctagtacgtaacgagtacctgatccgaattaaaaagagtactcccggcatgacccatcggaagtactctttttaattttacttttacagaaaatagcctatatcatgacgatttgttgactctttcttttctaagataggatacgatccgagagagtgtacctattaaaattacagccataaatccataagccatattatttcctgtcttatgagctactacggggaaatagatgaggctgaacagtaataggacaatatccaggtagaacataatctttcgataaatagggattctcacctcccccttttatttaccaaaaatggttttattaattgtaatatatcataacatagatacgtcctagtccgctcatcgatcccgcaaaatcaccgcaggtacaagtcgaatgtagattagctcccctgcaagctccaccatcgtctgtgtaacgatgactgccgcagctatagttgcccattctggcgggagtgccagcgccagcggcaaaacaaccaacgaattccgtgtggctgaactgaaaatcaacgcccgccctgcacctggattcaatcgaaatccattggcaatgatccgagatatccaaggcataatgatcagaaaagcaatgtagatcgggatcacgtttacgataatcgccatatcattgtagactttgccaatctgggaagcgacaaccacgatcagcgcaagtgccatcatcggaaccgggagccatgccgtcccattcatgacccgctccccgctcactttacctctggagaaaacttgggtaacaacagcgagcagcagtggaataacgatcaggaacagaaaagcctctacaaacggccctacctgcatgatctgcgctacctcagtacccatcaatagccataaataaaacggcaacaggatcatttgtataacaaataaaagaggtgttgcggcgagcatcagtttctcattgcccctgccgagttgtgtgaacacaatgacgtaatcaatacagggtgttaacagtaccagatagactccgatcagaacgcctggtgattgcggaaagacaagtgtgagcaaccatacaactacgggtacaacgataaaattagccactagtagcgcccccataaatcgaagattcgaccaggactcttttaactgtaaaaagggaatctgtacaaacatgctatataacagaacggcaagaaccggggacacggtgtagtgtaaaacattcccccataccggattactcaaccctatcgccgctcctacgaacagtgcaactacatagaaccaagtttgctgttgctccatcgtttctcttgtgagcattctcttcctcctcttccagtgggacatcgtgggcatggacatatttctgcttcgtttcgcgtacattgggacagagtgccgttccaacataagcggcagagcacaaggatctgaaggatcaacttgtgaattttttgcggctgttattagaatgtgcaagaactgggtatattcattgtagactgacccgtggttcattcattcgttaaaccaaggaggaaacacaatgtcacgtaacaatccgtacaagtggttaaacgccattggttttatcgctgtaattatcgtgaactacctctccaacgctctgccgatcgggggcaagaccaataaagaagtatcggatatgtatcctgtgctactcacaccttctggctatgccttctctatatggggtttgatctacctgctattagcagggtttgtgatctatcagttcgtgcccgcttcttggaaaagggattcgattacccgtctcgggtattggttcctggcaagctgcgctttcaacgtagcctggatttttgcttttcaaaacttgcagaccggtctcgccttactgattattgtactgcttctgttgtgcctgatcatgctgtatgtaaaaacacgtaccattacggttccaaccactgctgagatctggcttgtgaagctgccattcagcatctatcttggatggattagcgtggcaacgattgtcaatgcagctgtactgttatataaaattggctgggatggttttggtatcagcgaaccaacctggacgatcattatgctgattgtcggtatggtgctggctgtcctcgttagtttccgttatcgcgatagcatatacccacttgtattcacatgggcgtatatcgccattgcacttaaacaaaaggatgtcacttccgtatattatacggcaatcatcattgcgatcgtactggccatctatgcggtatggctgttcttcgcccggaatcaagatcgcgattgagtagtttacttcaaatataacgcttaaatataacgaaaacacgtaacgcaaacagccgattctggtcttcgacctgaaatcggctgtttatgtataaaagaacgaataaggttgtcctatttcagggcaataacttcaatctccaccagtgcatcttttggtaaacgagcaacttccactgcactgcgtgcaggataaggctgttcgaagaacgtgctatacacttcattcacaggaacgaagtcgttcatgtccttcaggaacaccgtcgttttcacgattttatccatacttgtacctgctgcttcaaggatagccttcacattgctcaaagacagacgtgtctgctcctgtacatctgcgccgaactctcccgtttgaggattcagaccaagctgtccggaagtgtagatgaaatcgcctgcatcaacggcttgactgtatggaccaatggcgcctggcgcatgatcggtagagattggttttttcatggacgagttctcctttgtgttcgttatcctgctgccgcatggagtcagggttcgaactcatttttgttgcctattataccacgatctacctcaagcgagaaacgctcctcactagccacatgaagtaaacagctcgttcaaaggtttcttagcccccgtccacaccaaggacatgaatgacttcatttgaatacacatggtttcccttggcttgcaccagcgcaatatttgtcatggcctgtgcaatagttgcggcgtggaccgcccggtatttgtccgctctgcctttcatccagcgatccagaaacttcatggcataggcagccatctgctcaccaaaccgcttctcgtttcgatctcccagaattaaggaagggcggaagatatgcaatgacggaaaaccgatatcggacaatgcatcctccatttcccctttggtccgactgtaaaagacccgggaacctgcactcgctcccatggaggagatcaccagcatctgtactacaccatgttgcttcgcaatcgtagctgcacgaaccgggtactgataatccacctgacggaaattgtcctgactgcctgcttttttgatcgttgtacccaaacaacagtacaggtcatcgattccatcgaataagtggtcttgcctctccagctgttcccagtccactacatgctgttccaatttgggatgttgcagctcaagcggacgtctaaccagaacgcgaaccaagctgtatgccgggtgctccagcagattctgaaccagtaattcgcctacaagcccggtggctccaatcaccatggctttccgttcgagacgattcaaatacatccctccacttcgccatcttttttgaagtcataccagatacatatgatcaatctaaacatttacaaagttgttctgtcatcgaagtgcccgtataaatattcaatatctattttaacagtacacgacgtccaagggtaaatgtcagaatcagcatcaagacaccaacccccacctgaaatccataggctgagatccaggcgagcgcattggaccaggtttccatcttttcatacaaccagccacccaacaacggcccaagaaacgaagtgactccggtcagagccgaatacaccgcgacaaacatcggtctttcacttttgggtgtgtctccaatcgtaaagttaaatgccagctggttaaatccacctacaccgatcccaaggaagatatgagatagaaatagtgcgatcaatacgggcatgaacgacattaaaccccacgataaacaggagagtgcaatgactggcaatgtccaaaataggagggttttgttgctgaatctggcattcagattgccccaaacatagaaaccggccatcataaccagcgtctggactaccgtgatcagggataccgtctgataattgatgttcaataaatcgagcataacataggaataaagcggaacaatcaaggtctggatcaataaccatgaagccaggaacagcgttgctttcaagaaagaacgatcctggaacggcttgatgaacatgcgccagaaaaccttttcggtagaacgttcaaagggaacgtccggatagaagaaatagatgactgtattggcaatagcacagatccacaccggaataaacaggatcagaaagcccatttctcccgggtaacggtccaaaacaataccgcctgcaaataagcatacgcttccaagagcattcagaatcgtatttcgaattccaaaataacgccctctcaccttagcaggtacgatatcgccaattagtgaagtccagatcataccgccgatggtatttgatataaaagcaaccgtatacacgccaatatatacgcttacccaccactctttggggaatatgaacgggatcagtcccgttgcactccacaagatgcgatgtgtgcccacaaataacagaagcatgcgtttacggctgcgaatacgctgcatccagtaagctgctccgatctgggcaatgttcacaaacgtggtaatcgcgagcacaaagccgatatgtctcgacccggccccaaggtacagcagaaatccggttaaaaatgggcctcccagcaaggtctgtaaaataattgccggtacaccctcccatgttgcaatcgataaattcgtgcgttgtgtcgaacccttgcgccgtggtttgcttgctaacgggggagggttaacgttgaccgtcttctgtatggggatacactccttagaccgggtctcaaaagccggtcgatgctagttgtcatcccaaattctactcacggcgcgaaggttgtcaactcattttttcacggtccaacgggagatagagatagaaggtgcttcctttaccttcagtgctctcaagttcaatcgatccccccagtaatctcgctaaatcccgactgattgacaggcctagtccggtaccgccaaattttcgactaatcgacccgtcagcctgttgaaatgcttcaaatatggaatgatgcttgtcctccgaaataccaatgcctgtatcctgaacggagaaaataagccatctattctgaatacctgcattcttaatctgcttggtgcttacggtcagcgtgaccttcccccggtgagtgaacttgatggcattggacatcagattccgcaatatctgttgaacccgctggggatcagaccagagcgtctcgggcagtcccggttttttgtccagaaccaactgaataccttttttctcggcaacaagctgaaagtggctcatggcatcttctgtaagttgtgcgacactgatatcctccagtacaatatccagccgccccgcttctactttggaaagatccagaatatcgttaatgagcgtaagcagttcctgcccggagtggtcgatcatattggcaaaacgtataatatcctcctgatccatcgtgtcggcattctcgctgatcatctgggcaaagttaatgacactgttcagtggtgtacgcagttcatgggacatattggcgagaaattcggatttgtactgtgaggcaatcatcaattgtttcgctcgatcctccagtacaatctgggctttctgtaactcttccttttgcacagataaaagccggtttgtactctggatcagcaaaatacgattctgttcattctgaaaatcacgtaaaataaatgcaaaaataaggctcagcaaaatgcctgtagggagtgtataaggcataatatgtgaaaagaagtatgtagccgggatcacaccaacgatagcaatgtttacactattgaccacattgacgataactgtaacaaggattcctttaataatcagcctgtagttgctgcgtctcatccatatattcagacctgcacatatcacgcccaaaatagacatgttaagtactgccgccaatgtagcatccgtgatgccaaaagtcagcctcgacagcccaattccaatacccacgatgattacgctatagggttgtctatacgttagaacggcaacaattaaaggaacataacgaaggtcaaagaccacttcatcggtgagttgaaacccaaaaaccgtactgatccaacctgcaaaaataaggacaagcacggaactgatctgcttcactcgggaagaagtacgtattacgacatatttatagaacacactagcaagatatgcaatggtaataagcatccccatattcaatacgaacatttttgaaaattgcattcactcactcctgttgtaccgactttactggccaaattgccttcgtccgtatgtgtctctatcatatcatgcccattgaaacttccgcattccttcttcgtcaaaaaaatacacaaaaatacacaaatcaggattcaatttgtgtgctggccgtagtagaatatattgttgtttaaatttgaattagttatttgctggggtcatgttcctctggagcatgaatgaaaggagaaaaaatgttgtgcaattgttaaaaagcaaatcctattggctgtcattgagtttaatgctgtctttggccgtcatggggctcttctatgatattcttaatagtccagaacgcgggttcgtagtgcttgattcgccgcttgaccggatcattccttacgtgcctggcatgtccattccatatttgggctggtacccgtttgtattcggtgtgctcgcttacctgtgtgccaaggatcgcctgacgtattaccgcgtcttgttatccatgaatatctgtgtctggatatgttatctgatctacttcaactttcagaccatggtaccgcgcccggaactgacgggtacaggcctgggagcatctgttctcggatggctctatagccaggatcgtccttataattgttttccaagtattcattctcttcactcttatctggttatgcgtgctgttctctcggttccaagcatccgcaaacccatcaagattttggtggccgccggggcagcaaccattatagtatccacgctaatgatcaaacaacatgtgatctatgacgccttgggtgcagtcatactcggcgaatgtgttctcaccatcataacaggcctcgctcttcaccggagacgcagaaaagaatcgaagtggaccgagggaatcagctgatccctcacttcgatggtttctgaagatgctgttgtcgtctccattcatcaataaacaaacctgcaaaataggggtcccattgggtcccttttccttcttccaaaatcgttaacgctttctcgtgactcatcccattccgatagggtcgatcagacgtcatggcatcaaaggcatccgctaccgcaatgatgcggccaaagaggggaatatcatcaccagccataccatccgggtatcctttgccatcatatctctcatggtgagatcgtacaccaggcagaaagtcagccatggcatcaatgggttctatctggagcagaatgctctctccctgcacgggatgtgtacgaataatcgcgaattcctcatcgcttagttttccatccttcagcagcacctcatcaggtatgccgattttcccgatatcatgaagcagggctgatttgtacaataaatccgcctgttcctcactcattccgctcagcttaccaatcatcagcgaatactctgccacacgcatggaatgtcctgccgtgtacttatctcgggcgtctaaagcagcagccagcgtagaaaaataactttgcaacaactgtcgattgcgttcctgtctcatctccagccgattaatcatcatattaaaaccggagatcagtgccgaaaactcatccgcatatagatccggagctcgtctgccaagatctcccccctgaattcggttcatctcatgcgtcagttcagcaactggatcacgaacatcacgaatcaacagccagcttcccaccagggcaaaccccgcgcccagaacaacgatgagaattccccacagtatgtactctttcgcaaattcactgtccatatactgaagtcggatatatgtagccaggaaaaatagaaatagaggaaataagccaatcagtgccgtacttaactgaaatttacgctggatcgataccaggatgcgccctcccagtgaaggttccatcccgtattggactttgcctcgatgtcgaatctcaagtaacaggggtctaatcgcccgtaccgttaagtaatactcaatcagcgcatgcatgatggcaatcagaaaggcacacgcagcggccacgacagtatagaagtaaggaaattcaagccaccctgtggatatcatccataatgttaatccggctgccggaagtgagaaaccaagcatgtgcggacccatgatccgatatatggtctgtcccgggaaacgatgaattttctcatacatgtggttcaattcgtctctctcgtggtgctcggaagtgaaaaattgtcttatggggccaagctgtatccacagcgtaattaattctgcaaccagcatgaacaagagtgaaatcagtacaatgaagatgagccgaacaaattgaatattgggtatttgcagagtagataccataactactgtgccgacaacaaaaacagctgccagtgaaccgatcagataattgcgtatcaggcgaaagataaatgaacggtatgcttccaactgaacccctcactctctatgtgcaaccagttctcccttgagacacagggagattaagggtattgccttctatttgtttatcggttgctccaactaaaaaaattaataaaatccaatggatgagcatcagaactggaaaacacaaaaaggctgctccacgacggagcaacctttggtgatatatcctatatttatcctttaatcttggcagccagaatcatcgtaccgcgcggctcatctcccattgcatccggttcaagcgtgatggcaaccgtatcatagtcgttggccgaatccaatgtgtaatataccgctcccgttccgtcacgactaaggaaagtacccgcattctgaggggtatctcctttgatcaaccagacctgaaaggcctcgttgccttccaggttcggtaggttctcagcctgcacaaccaggtgagtgcctttgctgtcaataacgatggttgcgagaccctgagctacaatgtcctgcgttgcaggattcagcttcactgcctcgccagtctgcatgccctgtgcaggttccagagctgatgccagctgctcttgcagctgtgcattctgcgcctgtgcctgcaccagttgctcttgcgtagccgacgagcccgccgcttgctgcgtcagcgagtcgatctggctccgcaactgcgccgtgtacacgcccagtaacagtgccgcggccgcaaggccggcactggctatgcgccaggcgctgctgctgcgcgcacgcgcgcgcgcttgtggctgccatggctgtgcctgggcagcctcttccacccgggccgcaggcaccgccgttaccggcggcaagcctggcccgggctgcgccgcacgtttgtgctgcggcgcaagatcctcctgaagcaccacgggtgcttcaggctctgcaggagtagccgctggcttcgcctcggcgctctcctgcgcatgtccgagcacgttgcccagcacacgtgctcgcatgccttgcggcggtgctacaggttccgccgccagtggcaggaagccagtcacttcctgcaattcccttacctcctggcggcaaggttcgcaagttgccatatgcgcttcaaacgccgccacttcctctgcttccagtccgcccagcacatacatcggtgccagatcagaccactcctcatgtcgttctatcatggatgtatgccctcccttcccgcgtccggatgcaattcagcatcggccagcaacttttggagctgtcgcatggcaagcctgacacggctctttactgtacccagcggaatcccgaatcggctggatacttcctgctgggttaatcccgcataataaatcgattctataacttgttgctgatcaccgttcaattgggacaacgcctctttaatccgggtgccttcccatttacgctgcacttcttcttccgtattcgtatgctcatcggcataggccgccagtgtctcgtgttcaactgaagtagtcgctgccccttttgatttccgcctcagcatgtccactgctatgttacgcgtgatcgcaaacatccatgtggtcagcttcccctgtgaggcatcgtaacgttcagcattattccagacccgcataaaaagttcctgaacggtctcttctgccgtcataggatcaccaacgatccggtaggcaaaagaatacaccgctcgctcataacggtcatataaaagctccagtgcggaggcatcacgttccgcgatctgccgcattaacctgctgtcctcaatcgattcagtcatgcgagggcccctttctgtttcttccctcttattataacctacgcagaaacttttgaagaggattacccctatgaagaaatagtttgaaaaattttctgtatcttttcaaactaacctttcacttcccaacttaaaaacagtccgaaaacatgctgctctggtcgcgctttcctttttattgcagaaaattacaacctgtggtatactataagagttgtattaaacaacctcatatgatttctgtcttctttaaaccccggaatattttcttcatgctgcgaccgcagcgaactataagcacaattaacctatgaagattgaagaacctgaatcacaataacccggtagtacagagtttcacaagatgttcccattcacactggcgcggtcatcggagccgcaaggacaaaagagaggtagggcttttgttgttttggatatcacttattcttgagaagattgaaaacatacacaaagcacccggaattgggttccgggtgtttatccatgtctacatatccaatttagtaacatctacagactgtcggacaccgttcctacattaagaaaagtcctccttccacttttcagactaaccagataaattcggctctgcttttaaaacttttccattctcccactgactgcactcctggacacttccttacttccttacttccttacttccttacttccttacttccttacttccttacttccttacttccttacttccttacttccttacttccttacttccttacttccttacttccttacttccttctccaattgtgcaaataaccccggcttataaagcaaatgtttacgctcaccagacgctaacgaatcctgcacaccttatattgaggatttctatgctatgtaaaatctaacgaatctcagccacgttaatccatgtcacttcatgaatataagctccaaacatgcccaaattgaggaaataagacgtctacgattcgttaaacttttgaaatggcaaaaatgcatggaatagcgtctgtggagttcgttaaagaaagtaatcccaacgctccttcacttctaataaaaaagggacaccgcaggatggaatcctacgctgtccctttctgaatcataggtacgttatgccccaacatggaactcaaactcggattttatttggagcacctatcgcaacgatccacgatcagcaaagtctccttgcactcacaaatacttagataaacatcgttttggagatgatgaccagcaagatgaacagtacgaggatcgtacccatggaaccccagcttccgccgccatgaccataggatactccacaaccctgttgataaccgtgcatcattggagcctgattggcatggtgtccgtatccatagccatatcccattggcattgttccacatccatatccatacccatgcatttcatgacctgtgtattggtatccttgcatatgctcataacctcccatatgtccgtatacgtgtccctgtccgttcggtgaattcggttttacttcgctcattgttcattcctccttaacatttgcctacacccctaagctatgtattcagcctacctctggaccgggctatcgccctcattttgacaaaatgggcgtttagctaggaggtaccctccccattttcgaagcatacgccatcattccatttcttgaattccaccaattcttccgttcaaccacaagctatcttatcttcctggctctccaccatgcttgtcctctagaaaaaaaaccccaccggttgcccggcagagctcaccatattatacccagaaagatttagtgatgattacgagcagaatgaacagaacgaggattgctccagtcgatgtccatccgccgtatcctacgccttcaactacgttgctcatgcagaaccctcctttacaaatatattagggtccaagcggtttattagatcaagaatgctttagagatgatgaccaacaagataaagagaaccaagatcgcgccagtcgatgtccatgcgccgccgtatccacctactactccactcatgtaaacccctcctttgatttgaggtacagttcactatatgcaccaatcacacatgggaccgggctcaggtcgaaaaatgggctgtttttttcatcgactattcgctaattgcaactacataaagggttagttcttaagtcggaatgttatgttcaaatatgtttaagtcataaataaatcccacggttatatcaaccaaatgtatgtactatcgttcaaaatggatacccatacggtatattattagcttttaacttgttaaatacagataaattacctttttagtaattatgaatactgaaatatttatttatgttattattttactaataaagtagaaaggagtttctatcctcaccacctaaactagattatcccaaacgaaatgatgaccttagaaaagaacccaaccgatgggaagcacattaggagaaattagacataatgaagaaacttattacgattttggcattagccacattgcttactgcttgtggtaattcagaaacaaacacaacaaccaatagccaaacgaccgaagcatccaaggcaactgaaactgtctcaacagaagcaaaagctacgaaatacactacatatagtggagaaggattttcttttgcatatcctgaatcctggaaaagcgtagatacaagtcaaatgaatgctccatccattaaagctgctttttcagaccaatcttcatcagtcacatttgcagataatatgaatctgacgattgaggccagctcaaccggttcaattaatcctgaagaatacgccaataatatagtggattattacacacaaagcggttcaagcatcggcatttccgattataaaaaaaccagctacacaaacaagccttataaagaatatagcgctggtgtcttggaaggagcctataaacattcctcgggtacagatgttatccttgtgcagtatctgattccgaccaatacagaactctataccatgacgttaacctacgccaaggatacttataatcaggatgagatcaaagatatccttgattccctaagcattactacttctctggagcaaacagcaccaactgcaacaactggaaattcatctgccacagcatcagctgcggatttctttaatgagttaactccgtacattacagaagacacagcctttatggagcaggcatcttatgatttctttggtaaacataacgatgtattcccagccattacggcagaactaagcaaaaaggtacaagggctcgttgactccaatgtaacgacccgtcatctgaataaaaatgtagccaactattacaatactttcgtacaagttaacggggaagtcatttccgttgaagaagatagctctctcggagcaaccttctctatcgttcatgtcatggatgagaacggaaacgatattatagcgttgtaccctgcaacgactggagatctgcttgacggcgattacgctactgtgatcggtgctccaattaccaacttctcttttgaaaatgttgggggtggttacaccaacgccacgttgattggtgcatcattggtagttgcagattaattaaaatgttaaatgagtacacaaaaagacccagcttaatgaacgttaagctggtctttttgtctttcagtttatagatgtcagaaattcacgttaactacgcagagacacaatctaacctttaattaatgacttataacataccgaataaccgtatatacggatgtttatactaaaccattaattaggtcttgcctgaagtgacgtcagtttatcctgaaccgattgtaacttctgtatacttgaggcatccggtttatcacgacggtcgtcaattttgacggatgtggaaacacgctgagctcctgacaaaaacggtgcttcatgcagagccgcaattgctgtaaagatctcgttaagcggtccctcaataatggtgctcatggaagttaactgatatgtaatgccccgttgatgttccaataccttttgcatgtccgccacataactgcttagactggttgtacccgttccaattggaattacagtcacttctgctattgccattttgctccgcctcctctgggccccgtgaacaaccgctgccgctaattttagtcgatttttgactgtttttattctaccagttgaatgcgttacaattcaaactgacgtgaagacgtcattcaaattgttcaaaaattttttttgataaatcttcaaatcttccagtccttttcctttgcggattcctggcttaaatggtatactcggaattacgttttactgtatcggcccactttacaaacacaatatgttgggttacagtatgttgacagctacaaaatgtagtaacactagatttctccgcttctattagtcaccttctgcattctcgcgaaaaacaggatgaaatcacctccaaaggcacgtccctgtaggtgtaaatcgctttctcgaaacagagttgacatggaggttaacggggctgtttggactgcatccggtatcctcaaactacaggcacatctgcaatagaccaagcttacataagcacccttttctgtcgatatccagaacttctaagacagtaaggaagccagagcatccatgggcattttcagccgcgaggcgggagaatgctttttatatgagcatgttctgaattgtgctgttttgtgctcctcaagttgagcgatttaagacatgaacttgtcaccgccgtttcagtctgccaaaagcaacctttacctttttctcaccgtaagacaacactcaattctttatataaagaatttctccaatttatatctttaacatgcgaaagcgaggaatattcatgccacaagttgtgaccaagccgaacaaccgccagcttgcctttgatgatatgcgcatctcggtatatgccgaccgtactctggaaggactggaaatgctggacaaggaacgtctggtacgtggggtaaacagcaagctccgccgtgatgaagttaccggagacgaaatcagcaacgcttttatcatgagcgcactggaactggtaaccaaagaggagcctaattggaaatttgcagcggcgcgctccctgctcacttccctttacaaaaaagcggctaccaaccgcagatacaagtcttacccggacgagccttatggcgcattccaccctcttcttgtagatctcgtgaagaaagggatctaccgcgaagaattgctggaatgttacaccaaagaacagatcgacgaacttgctgagtgcattgactaccgcaacgatctgctcttcgattatatcggcttgctcacactggcagaacgttacctcgctcacgattttgacggaaaagtaatggaattgccgcaagagcgttacatggttatcgccatgttcctaatgcaccaagagcctgccgagagacgcatggatctcgtcaaggaagcatactgggccatgagcaacatgtacatgaccgctgctactcctacgatgtctaatgcaggtaaaaaagtagccggtcaactctccagctgcttcattgatacggtggacgactcactcgaaggtatcttcgattccaacacggatgtagcacgtctgagcaaaatgggtggcggcatcggcgtttacctcggcaaagtcagagctcgtggttcggatatccgtggtcaccaaaatacaagttccggtgtaatcccttggattcgccaactaaacaatacagcggtcagcgtagaccagctcggtacgcgtaaaggtgccattgccgtgtacctggacgttttccacaaagacattctggccttcctcgatctgaagctgaacaacggtgacgagcgtatgcgtgcgcatgacgtattccacggcatctgtctgcctgacttgttcatggagcgggtatccacccgtggcgaatggagcctgttctgtccgcacgaaacaaagaaagtgatgggctggaaggacgagaatggtcgtgcactcggactggaagatttctatgatgagtcctttggcgaaggtgcgttccgtgataaatacgaagaagcggtgaatcacccacttctgtcccggattacagtacaggcgattgacatcatgaagcgtgtactgaaatcccaactggagacaggtacgccatacatgttctaccgcgatacggttaaccgctcgaatcctaaccgtgcacacggtatggtatactcctccaacctgtgtaccgaaattatgcagaaccagtctgccactgtaattgaaaaggaagaactcgtaaccaaggatggacaaactcgcatcgtgatttccaaagtgcctggcgactttgttgtctgcaacctgaactccatccatctggcacgtgctatacctcataatgtattggagcgtctcgttccaattcaggtgcgcatgctggacaacgttatcgacattaacaacattgaagtgttgcaagcccaatataccaacagccaatatcgcgcagtaggtctgggaacgtttggacttcaccacctgcttgctctcgaaggcattcattgggagtctgaagaagctgtaacgtataacgataatctgtatgaaaaaattaactacctgctcgtgaaatccagtatggagctgtccaaagaaaaaggacattatccgaaattcaaaggttccgattgggaaagtggtcattacttcgaccaacgcgagtacacatcaggtgagcgcgtaggcgagttcgtgacaaccgaacagtggaaagaacttcaagccgaagtacgacaaaacggtgtacgtaatgcttggttgttcgccattgcacctaacggttccacgtccattattgccggttccaccgctagtattgatccgctctatgagctgttatcttatgaagagaaaacaacttacaaaattgccaatccggctccggatctgtccgaaaaaacaagcccttattaccaaacagcgttccaggtggatcaacatgcttccattaatatggcggctgcccgtcagcgccacgtcgatcagggacaaagtttcaacttctacgttcgaccagatatcaaagcaacagaattcctggaattgcatctgcacgcctggagagccggcatgaaatcaacctattatgttcgtagccgggcattaacgattgaataatcttgatttttgcgcaagttacgttttatccatgatagagaagatttactagattcgaggtgaccaccagggcatcctgttttgattgcaaaatggcgttgccctggttcttttttgcctaaataacgatcacagcatcgtaagatgttgatatagatgccacattatacaaccctaatatataaaagaattaatgattacacgataacgaagaggacagaaaaaagctgaagaagcggagctaaaagctttctgaaagaaagctacttcggaagcatacacttcgcctttatcaccggattttcccctttaaaagagggaatcaaaaaaatcaggggataacagcgatcggaaggttgttctgtcatcgtagttatacagtgtaaattcattcaaggagtgaacggaacaatgcaagtacagaaaatttttaacaccgaagcccctaaccaatcaacccgtattattgaaggtgaatgctccggtatcctgaactggaacgacattcgcatgcctcatatgtacaaattgtacaaagtattattgctcaaccactggatcgcggacgagattccaatgtccaaagatgcttcccagtttgctcaactggacgaggaagagcaacgtacgtttaaaatcaacatctctctgctcgcggtacttgattctatgcaaacgatgtttgttggtgatgtaaaacgttactttaccgattcttcactcgaagcgatctcggccattatcggacaacaggaagtcgttcataaccaatcgtactcttacgtcctgtcttcgatcgtatctgatcgggagcaaaaggaaatttttgaatactggaaacatgatccagtcctgcttgaccgtaaccgtttcatcgcagacatttaccaaacattccgggacgagccgtctccacagacgttcttccaggctatggtcgccgatctggtactcgaaggtatcttcttctatagtacgtttgccttcttctacaacctggcccgtgaccagaaaatgatggcaaccagccagatgatctcgtatatccagcgggatgaaaaccaacactgttacttcttcgccgaagtgtacaaacagttgctggtagacttccctgaactgaacacacctgagaacatggactacgtatacacaaccatccatcgtgctgttgagcttgaaaccaactgggcacattacacactcagcaacgtgcgcggtattgacctgaacgagttggaagattacatcaagtacatcgccaacaaacgtctgcgtctgatgggtatggagaaagcatatgaaggtgtggatgtaaactgcatgccttggatcaaaccattctccgatgaagcactgaatgcaaccaaaaccgacttctttgaagctaaatcccgtaactacggtaaagttggcgacgataacggatttgacgatttgtaataaagaatagattataaaaacaacactccctgaactgtggctataatgcctaagttcagggagtgttgtttaattcgtatgtacaaacatcatatcagcgttgaaatattataatttaatagagatatttcttaatctaataaattcaagaatcgtatataattcttgaaatttttcattattcaatcttctctcatttaccgtatgaatatgaaacgggtcatacatcgtaatattagcaggtgtttcatcaggatgataatgagcatggaatttcataatcaactctttttgatcatcataccaatcataccaatataactcggtgaatcccccgtttcgatctatctcctctacacacagtacatcttcgataaatcattaaagacaattgttttacgaatagttctagcactgcttggaagaccctgggcaccatctcgaatctccataataatatctgaaaaatcattctcaataaaacgaaaattacttttcggtatctttaaagccaagacgctgcctccccaaatggtgtttccaaacttgtgcatcggtttcttcttcaggtgttaagttcaatttagttccgagtgtccgttcgaattcccctttgtatttatcttcatataaggcaatttgccctgtgtggtaatccaggtcactgacttctattgtggattggcgttctgcctcttcctttttccacatagtcacaatctctttaatcgtcgttctcttacctgatccatatacatatgtagtatcgtctgggatgagattatgtttgttggacccggctctttgaattcccataaaacggccttgatcaatccagttaaaaatcgtcgtaatactcactccaaaaaatacagataattctttaggagtataagaatgtacaacttcaatagaaggaatagaaggaacaccactgtctgtaattcctgtcggtacatccactgcttgacttaacgcatgtttgagaagagtaacatacttttctctaaaaatatcagcatcttcaaagatagattcatccaggttacgaacaaattcagcattatttctgactgcaagtgccagcactttgaacagtaaaatactattatccgaattactcaagctctgaactaactcagaagcaatctcatccgtgttctgactaaatatattcttctcaactcttgtgattcccatatccatctcacctcacactcctagtataggatagtaaagtttaactttcaacatcatacttaaacaaagttaaacacaaattaaactttatagatcaaacttaaagtatacttaaacagtatgctacgaagagcttgatttatacattctccaaccaacacacacttattatataatgaaagagattcatacccctcctacggaagtgaggcctattcatggaaagagaactgctggatcaaatcaacttgtggcatgagcaggaccaattcagtctcattattgaacatattgaacgaatccccgtctcagagcgggattatgatctgattggtcaactcgccagagcctataacaatgacgcacgttaccgcgaagccattcaacatttgttgtctgtccaggagcgtggagtaaacgacccgctctggcaataccgtttgggttatgcatactgtcatatagcgagttatgaacaggcattactggcttttgagagagctgatgaacttctgccccatgatgaatctacccttgaattccttcgcgagattcgtcccgaagcggacaagatgcgtcaagatcgccagcgtcatgaagaggagcttgccgcattcgagcagagcggtatacagaaccatctaagagcagcttcagggacttatgatcccgcaacgttctgggtacagagtgattatgcccaggaaaatcatgtatcagaaccttttgatgaagaagagattgtgtctattgagaaggaattgggttacaagctgcccgcttcctatattcaactgatgaatacgcaaaacggcggtatccctgcgctcactgtatttcccaccaaagaagctacttcctgggctgaggatcacattgccatttcaagcattatgggaattggacacgataaaatatacgcactcgctggtgagctgggaagtcggttcatgatcgaagattggggataccccgacctggggattgtgatctgtgattgtccatccgctggtcatgatgttgttatgctggattatcgcttctgcggccctgaaagtgaaccctgtgtagttcatgtcgatcaggaaaatgattatgagattacatatcttgcgccgaattttgaagctttcatccgtggattggtcgatgaggatacgtatgacctgtctgacgaagagaatgaggactaacacccaggagggtctggccatatgacaacccgtatatattttggttccaatcaacttggcgaagtggccgcagttttattacaggatgcgctgaatgagcttgacctgggaactcttgaagattatcgacgaacggataaaggtgttatgggtcagacactgctcattcgctcttcccatggagagtatattctaaaaggcaatcctttatatgcaggacagttacaggaagaaaagttctttgtagaacaactggcaaaacatacgtccattcctgtccctgatccatatttattacatgaagatacccatctgctaggctggagttatgccataatgccacgcctgcccgggaatcacctgtatgatccaacattccaggcttcgctgtcacagcaagatcaggaagagattgcctgtatgtttgctcatactttggctgaactgcaccgctggaaggtgcctgatgccggggaatatgatcctgtagcacagcagattgtttcctttgcaggcgattatctggactggttgtacggaaccattcgtcactggttacatgatgctgaacagtactcggtgattacggatgaagatgttcagtgggtggacgagcaattcaaaaatgctgaaccggcatttcggtccagagctgttccgtgttttgttatgggagacttcaaggtcgagaatattctgattcaaaatctggacgaccgttcttcagggtggcagattagtggtttgttcgattttacaacggcctatttcggagacggaacagcagacctcaccaaaatatccaccaggtatgttcgtgagggtcaaccagaactggccgcacagttccttcgctgctaccgggatctggtctgtgcagcaaatgaggagaaatgccaacacttccgcacacgtctccgcatgcatctgctctatcaacgtatcttgtggtggggggaagccaaagcgacaggacaagtgacgtgggcagccgacctgccttttgcacagtgggcgcagcagtccattaattcgattgtcgcattgttagattagtagattagttagtagatttggacaggtcgctcaatggatagcggccttccaaactaacatatgtatcgttccatacatagcgcccaacatgcgggcgcacgtataaaaccgccagagatcatccttgatctttggcggttttcctcatctcactatatttaagtcaacgatggaatctctcaacttaagcttgtgcaacgggtgactcctgatgtttctgcaaaaactccagcatccggcggtacacaagaatctcgtttgttttcctggagaagccatgaccctcatcatctagaacgatgtattccacatctagtcccttcgactggagcgcagccacgatctgatcggattcggccttcacgacccttggatcattagcaccctgaatgaccaacattgggttcaccatctgatccagatacgtaatcggtgaatccttcgttaaacgttcgcggtcacggatcggatcacccagccagttatccatcatcggcttccagtcttccggcacggattccaggaatgtgaacaagttgctcggcccaaaaatatcaaccgcagccctgaacagctctggatggcgccctgctagtagtagggtcatgtatccaccgtaacttccacccaccacaaacaaccgctctggcgaggtaattccttgatcaaatagccagttgattccggcaacacagtccagccttgggccttcgccccaatcccgctcaaccaatttaacgaattccgcaccatacccggtactgccccggaagttaggtgcaaagatatgatagccctgagcgagcatcatctggaacatcggccgaaaaaactttgcttcggaagattgcggcccaccatgaggccaaaatacggtgtaaccattggcctgctctggttttgctttgaacaagagagcttcaatctccagtccgtcgtaggagttatactgaataacgtcagggtacacgagatcacttgggtccagtccggttacccgattggcagtcagcggctcccaggactcagcacctgctattttgcgataaatgttatgcggttggatcgctccacgtccgaggatatacacattgccagcctttgtaacgttcacctgctctatcgtatccagcggcatctctatgcgccgaggctcatcggcatttttgcccaatacgtacatacgattctccggccctgtaagtgtccagaaatataaggtctcggaagcctgatgccaacggataaaatccacatcttccccttcgattctgcacaataagcggaattcgcgggtatcgatacggtattcagccacataggcgtatgcggagtcatcattggtaatgaacagaagacgattatcatctgcaaaaatcagatcagatacctgactataacgttctgaagctggcagaatcaccatttcttcattgttacgatacagatgcgccgtctgatacgtattggagtacatttttaaaataacataactcttctcgtcaggacttacagcaaccaggctgctcgtaacctcttctccactgtataacagttcatcttcccctgtctccagatcgatgcggcgtgaattcagataattcggattacccgcgctggtaacataatagagacgctgtccatcctcggacaactcagcgaaataacagcgatcattcggttccgccggaaccacaggcagaggaacaccaccctcaggtggaagtgcatacagatgatagttctcatctccatcccgatcaaacgcggtaagaagatgacgcccctgcgggtctgctttgataaattgactgctctgattcaagtacgttaaaggatacgggtatcctccaggcaaatccatcgcccaaatattcggctgaccgttcagattgctgtccatgaacaaacgtttctcgtctgccgatacggcgaaatgtgaaatacggtacgtctgaaaatattgctcgacatccggtttaggaaactgaatcatgacaaacctccttggaattgaaccaatgaatttaacattggtaaattaaggtaccatttgtccatattataggtaatgccaatgtttagacaatagatatgtaagatttaaatactaactccctcatagctttgtatattattatccatattcatccagcgtatgagtggtatatccctccctgtcacgcataatgatgcggaatagcccttgcccatattcagggaatgcaatacataattctgtccggcccattccagcacatgttcatgattacgtatagcctgtaccgtattcagatttctccactgtccacataaagattgaccggaagccttgatccaggcctccttgcctgtgaggactttccacaacagggaagaagaatcctccccggaacatatggcttcaagcacatgatcccgctcttcttccgtcaggaaacgttggatgatggctttctctcgcaataacggacgtacccattccacatcaacgccaagctcgttgttagtggatgtaaccgccagtacacacagcccattcgtatgcgaaaggctgaattgcggacctcccacgagataaggctttccggaagtgccgtattcaaatcgaatatcccttgcctgaagctgcatgtactgtgccagtactcttcgcaagaaaacccttgaaatcacccagcaatgagcctgtagacgtgaggttctgctgattctgaccatacgttcatgttcttctgaagtcattgcatcggagtccatggcagccgctgtctgcagttgatcctcccttatgggcaaagtctgtgtccaaatgtggacctctggttctcctgaaaatggcgtggacgtatcattcccttgttccctcattgccagaaggctgctgattgttccggttctggaattcataacgccctcctccctatgcggggttacatgttatcgtataacaaccatccgcagacgagcagacgttgcaatagttctaagaccactcctgacctcttcttctgtcaattcaagtgcatacgtgccaagctgtatataatccagtccgatcacctcatattcggagacgtgcatgcatcgctgttttaacgaatccatgtctgcataatacttgcttaaccacttcatccgtgcatagttgaagttggatagggacagcgttccgttctgaatatgctcacacatctcctcaacccggttatataaagaaacgggatcagctgaatacccacaagcgttcgaaaaggcaaattccttacgataatagtggtcccattctgcacctttatgaagcagacccaactccatacattccgcatggaaatcggaagtttcacccagtaaagcttcaatgccgatcatgcaagcgacttgctcttttaaatgcatcccatcttcggcacggaacccataccttacaagtggcaaggacaatccgcattcaatctcccgatattgcttattggagtcctcgcccaaatagtcgagtgtaacttctggcaggtaggcaccattcagtggttccatcgcagggaatttttccagcatatccgtaatgaactccgtttcaactggaccggcaaccgctatcgccatgctccctgtggcatagtgagtgttgtaggcatgcttcagctcatccgttgtcatttggtacagactatccggtgtgcctgcaacgtccatcgtgatggggtgattgctgccatacatcatctgagtcaactgctgcaaagctcgccaggagggctggtctgcatacatggacagctcctgatgaatgacggaccgttcctgttccacatgcatcggggtgaaatatggagcagctagcatgccggtgaacacctccagacttcgtttcaaatcgcctgtgcaggccatttgataagtcgttacatcgtaacgcgtcaatgcagatgtcgaagctcccagagtatgaaataacggcttgacgggccgttgatccggattgtagaacatcatatgctcaaggaaatgtgctctgccaggtagggctccatcatggattgagccataggacacggaccacgaaacaaaagtatgatggaactggggttcggggaaaatgtggaccgacagaccattgaacaagcgcctgcggacaggtgcgctattcacaatactattcatgagttacctcctgcactggtgcggaatattcactctcaggatacaaaatccaggtgacagcctttttcatgccagaggctacctcggccacttgttccgcagtaacgcaggatatggcttccaggaattgcggagttgtcatctggacccggttgagcaatcgatcgatatgaaggttgaccacctgctcaggcagatcgtatcccacttgcacataatgcatcacattctgaatcgctctattcagctccacttcctgaatgtctcccctgcatatcctcagccattcagcgtctatcgcttcaagaacctctgtcacatatccactgtttgttcccgttgtcacatgaagcattccccgataatcatccagcgtgctgtagatctgatacacccattgctttcgttcacgaagctcggattgaagcctggaagcaggcgtagctccaaacagggaatgaaaaagaaacagggtaggataatccgacgatccatacgtcaccccggtggtgaaggtcacattaatcttgcattgctgaacatccatcagttcaagcatcatctcgccttcctcccggcgctcagtaggttgaccatgcccgatcacagatgggatagctcccccctcagccgtgacaagcaatggcacaaaggtctccatgacctgagctatcatcacatccgactggaaatcaccgatcacatgaagatgtagtgggctacaaagcacctcccggtaccattgccgaagttcaccatcacgcacacaatgttgcagttgctccacgtcggcatccctgcttcgttccgcatacccaagccattccagactgcgcccctgtaccaccttgtcccaattggaaacatcatagcccgcatgatgttctgcccaaacaagttcctcctggatctgcgcttcatcaaaatcaaatccgcccttaaggctcggttcgaacatcatgtctgcgagcagcttcagcgcatcgagcgtccgtgcctcggtcccgggcagcaaccctgcagggatacgcaaccggatggatgcaagctgagtctcccccttctgctccaattcgcatcttagctcatcggcatacatggaccatagttgctgctgtagctttcttttgccgagcgaatcctgcctgaaaagcaaccgcacaatgactgcaaataccgctgagggaatccttccctgttcgttaacgatacccaggtggagataacagttggcgtattggcttgttggcatcacatggaccgatagacgattgtactgctccgtaatgaaagactgcatccttgcctcccccttatctgacggttaacccaaattgtagatcatgccactcgcggtgttcagtccaagctgaccgaatccctccagcggcttggagaaccagtccacctgactctcagcttccgctgaatgaagattagtctcatcctctttccagtgaatcacttgctgatggtgacggtcccagaatctccataatgcaggctgcttcagcagttgattgcgaaacggctcatatacacgtcctgctgattcttgaatatccccttctaaaatgaaaggcggcaagaaaacaattttggaacgaaaatcttcagtcaatgtcatgaaataggggcatacaggcttgcgtgtcttggctaaaatacgaaaaataccgctcctcgtgcggatgcgtgaactcaggaaaggaagctccactgcgcgattatccgcgttgaacccggtctgaccatctacgaaaaggttgaatgaacctcccttccgcaaatgagaatataatcgtatgccaatcatctcatcctcagcattcagcagatcggcacctgcaaactgccgtagggtattccaggacgacagcttctgttcctgctctacggtgccctgctcagccaccagatagaatggtaatccggacttcatgtggcctgcgcgaatctcctgtccgatggtgatcatattatgcctgacgaatccataatgccaggtcaacaaagccccaccttcctgcaaagtcgcttgcagatgttcaagcccctcgacttcatcccaatccataaaggagtacgggttttttttgtgttcgtcaaccgtccgcaaaaaagccaggtaatccatccagatcaactccggtgacgtttccaattgaagaggcgaaagttccttaacaatattcattagcgcatagaagaatcccagtcgaattccgtctgtcttttcccgatacaactcctccctgacctgttcccgatgtaacgtatataatgtacgaaaatccttcatactcacacctcctttaagcccttattcatggatgctcccgctcccgacagcatctcttccctggctgcgccagttcttgaagacaattcaaactgccgacgattccggtcgataccatccatcatatagaccaacattcgaagcgccagctcatattgtccaggaatgtgtcgatccgattgcacaccctgtccttcaaccatatccatcccttgataagctatcggtacttccagtgctgcagtaacgcagtctcgaatgttctgccacgtcggccctgcagcaattggaaaatcaacaaaggggaagctacccggatcaagggaatccaagtcaaaagttaaataagccgagtcgacatcgtacttctgccttacctcgttcagaacacggctcaccctctcgggtgtcatatgctctgccgatatctgaatcaagccaggatggctatacatctgatctgctgagcgaagaccacgcaggccgatctgtacaacagcagcaaccgtaccctgctctagcagatgtcttacaaaattggagtgactgggatgctcctgatgaatggcatcgataccgcaatcatgatgggcatcgaactgtaccatcacccttcgactgcccgtggcctttgccatcatctgaagcacagcatgcgtaatagaatggtctccgccaatgcagcataatagcgcctgttgatccagcgcatgatccagtgcggccgcaagccccttttgataaggaacagctgtatccggctccgcttcattcataagacaagtaccccaatcctgcatggttacgctctcaagcaatcgtctcccacttccaatatcgtacaagctcgaattccctgactcttgcaacgatggatagatgacctttttccacgattctacacgtaacgcatgcgcaagtccggcaacggaggagtttaacatgcttgtcccaccagaatgagggatacccaagatccccagttgaggagcccgatgaccgatgagaggctcatataaaaaaaaaggcgcttccgcaggttccacccccggcaaatccggggggcgttgtggctccagctctttcgcaggttccagctcataaaactggctgaacgtttcatccgcagcgatccacgtatctgcaatgcgacgtaccagataagcaggttctgatgttgtcatgcaaaaacctcctgtacgtagttagagtcaagtctgtgtggaatagctcttattcggcaacgttgcttcaccttctggactgatgtccttatccgcagacgattccacatattcccgcttcagcattcgcatgaaaggcagcaagaacgacgacatgccgaccacattcatgccagcaatcaccgcatagaagtaagtgacctcattgaaggcccgagttagtccccagccaagtgcgataataatcagaaaatacaccgcattcaggagtatggcctggtatccgcgcccgctctgttccatcgtcagcaacgttgtcatcatgggacccatgccaatataggaaagagccacgatggacagataccttgccgcttcggctcgggttgctgcgtcttcgattaagaatgcgataagcggatctcgccagatccagacggcaacggcaatgatcacgtatagagcaaaggattgcagcagaccttggcgatagcttgcataggcccttggccggtgtggtgactgcaaattatgattgatgataatgccgatggccgatccaatcacgatacccggcaggatcgccatcgtctgaattcgataaccaacgccaaagccagcaaccgccccttcgccaaagtgactgacaattttattgaaaaaaaatgtactcagaaaaatcatgcagtaagagatgaacacaggaataccgacatgcctgagggccatcagatgtttttgggcaaaagcaaagcgttcaaagatcatttcccgacgaatgaacagaatcagcagggagatggccaaggacaggacggaagtgatcaggttggcatagatgatgcccttcagatccaacccgaagaccgacacaaatgtatacacaagagcaatgtttagcatcgccatcccaaccgcgttccacgaagctgcctgtgcccggcccagtcctcgtaacgccgcactggtcaccgccgccaggacagccgggatgctcactgccatcatgccccctacgtacagcgtaaacatgggcccaatgtcggcaggcacacggtaaaaccatgagagcacaggggtcagtaacatcaccatgcccccggtcagaatggcaagcagcattgcactgcccatcatgtgcacgaatagctgggtaaatgcacgagagcccccgccacgactgcgcgccaccgcgacctgaacagacagctgcatcgcttcgatgatggcaatcatgacgaatgagacaggaatatacaatgagagcacatataatacactttgactcgtatgacccaagaagaatacattggccagttgtgtaatcacgttaaccagagaagcgagcagcatcggaacggccgtacggaataacaaacgatggatcgagccggccgtataatcgatcccctgcatggggttcacctccacaattcatgaagtcttgatttcttgattcattgtaagcctgctgaggatcggcagacgtatcacatgcacgcaacaagccgatatcatccgatcgtcatcccatgagacgagcatgacccgatcatctggcctgataatcccccgctctagcttatctgccagctgtatccatacatccccgctctgataatcggttcgtggtacgcagatggtcttggaaggggaaatatgcaaaacagaactgccattgagacgtaatcccagtctcgactgaagaatgacgtgttcggctgcatggctgtccatccattcgtggatcatgccgagtgcctcggatgcaaaagccgtggctttatccgatctgatgatccgtttccccgcatagtgtatctgcaacgctccttgaccaaggcctacctcaagcgccaccgccatgtcgcccaaatcacccttaggttcagatggttgaccatatgcaatctgtccatcgtcatggagaattcgctgctccaccagaacaatcgcagtccgttcgttaggaagcatgctccaaagagcaacctgaatggcctcggtgcctgcgagcgcacccatatgggtaataccgagtggatgatcaactcgccacggagccgtttcaagcattcgggcaagtggagcattcaatgcatgtcgttcgggacaggtctgggcaaggatcaaccaatcccaatgcggctttgtggacaactgctccagcaccataagcgcaagatcacccgctgtcacccggctcccgtctgccataagggagcgagtcagcgttcccacgcgaccataatagtgatcctccatgtatatgtgcggcgatacgtaaacataatcatccggtgttggccaatccagcgtgtacagatgatcctccgcagtaagccagcaaatatgatccacatagattggtgcgccaatatcaccatgaagtgaatcagacatgctgcatcttcccgttggcatacgcctgaaaaacgctaatcttctgaatggacgttgtgccttccatgaactcaaaggcccttgcatcgcgataccatttgttcaacagaggatgctccagcatggaacctggccccatcatctccagtgcccattccgtcgcttcctcggcaactgatgcagcccgtattttactgagggaagccagatatcccttattcgcatcatggtcgatctctgctgctgcattccgaatcatgctgcgtagcgcatgcaaacgcatctccagtcgctccaattctgtcttttcacgttctgtaaaaatcgttctgtgctccacaacataatcataagcagcctgtgcaacaccaagcgccaatgccgccacactagggcgcatccggtggaatgtacgcagtgccccccacaatccacgcttggttgggcttaaatgacgacccagaatatctttctcttccagtgggaaagcctcgaattgcagatgactgagttgcagaccgcgaagccccatcgtgtccagcggcgttgctgtgaaacccggcagagaaggatcaactatagcgacctgaatgcccagaggcgtacgattggtctgagcgaataccagtccaatactcgcccggtgtccgttcccaatgtagaatttatgtccggttagctccattcccccatccggatgtcgcgtaatccgcgtgctgatctcggttgcatctgaacccttctccggctctgacaaggcaaaaacagcccaggcaggacctttcagaaagtggctataaaagcgctccttctgttcctcatcgcccaagtcaatcatgacgatgctggacatggaaggcccaggtcctcccagaaaaacgcccgcatctcctgcggacaactgctcgatcgtaatgactctttccagcgaagagagtccataatatcgatcctgacctatggttacaattggctggccgccatactccgggggaatcatcatatgattgatggcctgcagggcagacgtgtgcaaaaactcggtgagccggtctggctccctgtcgatgatcaggccgatctgacgaagctccgtagcatactgcttcatcacttgctcgaaaatcgcaatcgttgatggagtaatcatcaatattcctccttagctggcaacagcatgttcttcaccagttggcctgcatatgtatatgcagatacgccatgtctcaaaaaaccgaaaccgccgccaagacgttgaatctgtctgaaagcttcgtccaattcctgatgtatccacgcatggacccggaccgatggaagacctggattttccgagaggaagcggtcttcaggcaacgtttccgccatgtagagcgttgtcaggatgtcagcgaccatgcctttcacgagctggtgctgaaacgtggattgcccgcccgatattcgcaccgacaaatgcctgcgaacctgctccaatccagccttgcacagctctacgcggaactcaagcaggcgtgttctcagctcattcgaggtcactttctcgcctgatgtctctgccttctcgccctcgttcggctgtacccggcataacagtagtccagagggctcaagcatccgatcctgcacatgaacggcatgtagttggttccaacgatacagccctgctgattgttcatgccaaagtaaagcatcttgttccatgagatgagcggttgcgagcacgtagggacctgttgccaaaagcactggacgattgttcaccagtaaggtttttgcctccaacatttccgatatcggagctacggggttgcctgctgcctttgatccgacgggcttagcatctgggccctggaattcaataacgtgcattgtcattcctcctgttcattcttcttcgcatcctccatgctccaccagtgcaaaaccaaaaaaactgccgagcccgatactgaccatgatggagcgtcccttcctacacacccagtcctgctccaatcccgaactcaggttaatgaacgggtcggtggaaaaggtatgtccgattcgctgaatgttatccagatatatccgttcaagtccaactcccgtacgtcgcgagaattccttccaggtagtccagttcacattatggggaaaaatatgattcacatcttcgaaactcaggccttgcgttgacagcagctcttccatcccttgaatgatatggtccacatacaatcggttaaatgccgagatctcatcggcggttgcatgataaccagtatggaaccgggtatctcgcagcacatgcgccgcctgaacgacatgctgacagctctctctgctcaatagaacagctacggcagaatcacccagaatggccgatttgcgcagatagcgccattcgggaggcaaaaaattgaattgatccgcacagatcaacaacacattccgaatgtgaggctgcgtttgcgagattcgctcaagccattgaagagcggctatcgacgatgcacagttcatttgggatatgccatagaacggtacatgttccagcccgaagcgctggaggacacgctgcacaagcctgtaatcgctcggtgtctgcacctggaaggaatggacatagagaacaaggtcaattccggaaagggcaggtctggtctggagtcgttccacagcctgtgcgatcgtatcgtcaagcatctggcccggttccgttacaggcacaccttccaggcggtggtacttgcgcagaaactgaagctcgcctttcccaagctccagggcagccagcacctcttccggctgctgaatctgttcaggcaaatagacgccaatatccacaataccgaaccccaatgttctccctccttctgcgattagtgtccatccatactccattcacaagttcggatcagcaaggcgtgaacaaacgaatccgtctgctccagatgcataagacatatgtactcgcccccgtccttctcttccagtaactcctgtaatgcgaagaatggcgctgcactccagcgcgatggatcataataactcttcgatccacattccctgtaccaggcagcctgattgcacagctgctccagatcaggatggatgagcaggttaatctgattccggtgaatggatgccctgacacataatcgatccagtaccatctccgcagtatcggctacggaatgctcggcatgtcgcatctctacaccaagcagggaaggtcctacgcctgtcatccgatcaaggtatattgctgcagccgtgtccggtccagtcggtgaaacaagttccatcgtttcataggggagagccgtctggtccataaccagcagcatgcctttcatgtaaccttctctgcccagataatgctgaagcatgtggagcgccgcaaaaggagcaccaaaaccaagatcatttacagcaaaactgataaaacgggcctgataacgatccatcaaataattcacaattgatatatccgggcgggtattcggaaaattgtatgccagcagcaacacatccacatcctgcatgacccgatcaagtcccgtctcttccagcagttccacactcatctcgtgataggcattgttgttacgaccctgcaaaagttgaacgtcgtacttgaccggagtacccgcgagcatgtcctgatgaaatcgcagcagttccggatgatcaaacggaggcttcttctccgagaacagcctgactcccatctcccgtatggcaacaggcgaagccatcaggccgcaatgagctgcttctcaatataagcagccagggagcctaccgtatcaaatacatcgggctccagatcatccgggtcaatctccagaccttcaatccggtcctccagcgtcatcaacagttccagaacagaggtcgaatccagatagagttcgtcaaataaagatgtgcttaattgaatatcctccctggcttccgtattcaacacttcagcaagggcacctttgatctcttcaagcaatactgcagttgtcatgatcatcatctctcctcatcaattggttattgctgtgtgggacacttgaatcaaacgttgcttggacagtagatcctgcggagtatctcgctcacggatcaagtgagcctccccagcgacaatcagcacttccgccggacttccatgactcaaaaagtgtgtgggagaagccgttggtccgtaggctcccgaatgaaaaacaccgattagatcgccccgttcaacaggaggaagcaatacccgtttcccaacaacatcattgggcgtacataagggacccgtaatattgtattcggctacaggggactccccataacgcgtcagggaggcaatcggaaagttacgcttcacgtaagaacctgtgcccaccgccgccatatggcagttcgttccaccatcggttacgacgaagtgctctccatacgattgcttgacgtatagagctcgactgaccaacataccgcaggtgcctaccagatatcgcccaagctccatgaacagccgggtgtttgtatgactatgccgaaacgattcgaacattggattcaactgttctgtcagtgtggctatggatagggactgctcaccttcatggtagggcacgcccaatcccccgcctacatcgaccatacgcagcgtgatatccagctcgttctcgattcgatcagccagttccagaatatggcgggtattctgaacgatcggctctacatccaacatgcgggttcccatgtacacgtgaagtcccatgatctccacatgggagaagctctcgaactgctcttttccctggagcacactttgttcatccataccaaactgacgtggtttgccacccatggtcagcctggagcctttaacagaaaaagatggattcactcgcagtgccaccggcacgattcgcccctcacttgcagcgatgctctcaatgcgctccagctcctgaaacgattcacacacgatcgcatatatgcccagacgtatgcatgccgtaatctcgtcatcgctttttcccggtcccagaaaaataatgctttctgctgctactccagcctgtacagccgtatgcaattcggccagggaacatacctctgcctgtgctcccatctcccggagcatgtgtacgatcgaaatattgggattggccttcaatgaatagaacagctccacttgaggcgtaagcaatcccctaagctcctgatacacctgctgcaacacatccccgtcatatacatacagcggggtcccgaatctctcggcgatgtccgaaacaggcaactgctgaatctgatattccttagacactcacatcacctcgttaatggaagataggacggcttctatcgcttcgtcgatcactcccagccgttcaggggaggacgcaataatcacgccatacagacgtccggagaacaaggtcccctcacttctgaatgccgcattgactgtggcaaaattattgatcaataatccttcgccgcgttccggttcgaacatcaacgtacccaaccgggaacgaagtattccgtattccagcgggtgattgagccggagcgtatattttttcgccaatccacattgatctgcgggcagccattgatgctgaatgttggtctgataggtagacatattaaacctggcattaatctcaagattgggccagattgtaccgtcctcgtccagaatggcgtccatgccggcaatgccgtagtatccatctcgatacagagctactccaattcgcatggccgcttcacgaataacctcaagttgaacatcgttgagccgcgaaggcatgagatgcccttgatgcacgccttgctctaccaacgattccttgacgccaagaaattcaactccgccggagcgatcgatgagaatctggtaattcaggtcacagattttatcaatccattgctcaagcacgtagttgatttgccgtattccctttttgcttgcctgtttctccagcatactcatgcatttgtgaaacctggcttcatcggtgatgacggtaattcccttgcctgatacacccatggaatccttcagcacaaggcgtccaccctgctctagaacggcctttagctgatcgaaaccagacaccagttcatccaaagatgtgcattcaacgcctggaatctggcgaatgcccagctccgcgttgagacggcgggaataccccttgtcattcaccttgcggaagatatctgaagatggaacagccagcggaatgccggtccgtcgggagaactcctcttcctggtccgaggtaccaaagggaaccagataagcatttgttccagcagcctgtgacagctctcgcagcttgtccaccgtttttggacaatgcagaagattcgcggtaatgttcagtgccggatcattgtgctccaccgttatgcatcgggagcgaccaaacccaagcgcctgtgcatctgccatgaatccctgattcggcggccccttgagcaggataatatcgttctctccggcgaggaaaacacccagttcctccatccgattaacgacatccgcagccgagcctatgcttaatgagggcagcttgagaatacccgtttcactccagtactcctccacctcaaaattgttcagatagacaaaagtaacgtcatgctggcccgttaacgcccacttgagcttgctcgaaaaatccgtcaatacggtggtcaaggccatcccctcctattcctgcatactgcatcactgctacgctgaatgtaaccccaagtccgaccgtaacaagcagataatactcctctggttgcaacaacttctgctctagaatggcttgcaaattaataaatgggtccgaacagaagcaatgcccgatctcctgcacattggacgtatatatgcgttcaaggggataggataaacggatagccaccttcttccacgaggatagattcacattgtgtgggacgatgtatcgaatatcctgcagcgtcagacccgcctgctccacggctgtaacaatggcttcacataaccgaggcgtgtagatttcctgaaactcccttagaatctgcggggttcccgttagtacattacagaattggcccagggtaacactcgtgagtccgacgacacgacttccgttgcccttgttacccaccagcacggcggctgatgcctctcccatcacggtggtattggggattaattgcacaacgggactaaaggttttttcacctgtcaaaattaaaatatgatcatccgcttccaatgaaggcagcaatgtctcggcaacattcagggcaattaagcccgatgcacagttctgctgcgtaagcgaaaacgcgatggcatgctgcaacccgtaagcccttttcagggcttgcaaaactttcataggaaaggggaaattttcctgaattgtgtggcaataaatgatatacttaatcgagttaggagcgatctccgggttatttaccacctgggttaatacgcgcccaagcaacgaagccagatctccatccctgtcttgccgaacctgtttcaaaccatgaattttttccagtaccttcgtctgggcattattgagtcccagcacctcgttcagttccctgatcggcacaatgtgctccggaatgtaagaccatatttgcttgatatgcatcggcttcagacacctcgttatcactaacgtacgaatctcactgaaatatagggagataaagagcttccgcagaagctcccatctatgaatctagcgtaatacgataagtaagtaggaaaaatcaggcacgagccgccgctgcacgagctgctacagcacgagccgctacagcacgggcttcaactgcgcgagcggaaaccgcgcgtgcactgacttcacgtgcctcgcccagtccactcgtttccaattgtgctgcttcaacttctttgcgctttagttgctccagtgtaatgggagtcgctttaatgaccattcatatctcctcctttcatcttggatactctgattctataatctcccaaattgcatttaaactgtaaatgggggtaaatgaacctctcactctccttacccctgcttctggacacacacgatagacccaacataccaatcagatctccattccaatcaaactatatcaagggacggtgaacgatcatgctcggacccaaaatccggcaaatccgggagcagcttggactgtctcagaagcaactggcaggtgaggatatgacgcgttcttacatcagccttattgaaaaaggcagagccgttccctcgcagcgtatgttgaaaattattgccaggagacttaatacacccatggagttttttttgggaggaagtgcagcaacagatacggatattggggaggctgtactggacaaggccaaagcctgttatgccgagcagaatgattctgcctgcatccgcatagcccataaagtgctgacgttgacggaggatacatcggatcagtcagaagcctacctgctcattttacgaagtcacaacagacttggggattatcgacaagccttggatgagggggaaactgcagcatttacggtcattcgaacaggtgacagggaacgtattgttgaatattatctggaaatggggagagcggcttttcatgcagagctgtttcatgctgcccggaaacattatgaacaggcgtatacgtacagcagcagactcaaacatctacaagaagaacacattcaatcgctgacctttcttggcacaacccatttaagactaggcaatgtgaatgaggggttgaactactatctcaaagcggagaaggaagcccagatggcgggacaaccggaactgtatggcgagattacgctgggtttgggcaaagcatattatatgtccgaacaggacggacacatgctgttaagttatgactggaccaagagatccgtacaggcctataaacaggcgagcagcgaatcctacgttctggcacttcacaacctcgccgtgatccagcttcatatggggcaaaaaaaagaagccctccccttgctggatgaatgcgcacgaatttacgataaacgcaatcttccccacaagaaggcttccatattagaggaaatcagtaaagtttatttggaacagcgtgagccagaacaggcagaggccatcatcaaagaagccctccaactgctggataagcaagatgaagggatgcttcgtgccaaactgtatcgcttgctgggtattgtatttcatgagaaaaacaacagcaatgaaggttattactttctaagaatgagtcacgatctacttaaacgcatctctgcaaaccgcgaggctgacatcagccaacaacttcttctgctaagccttcaggatcgtaaaatgaactacgacgactataagtcattgatcaaataaaacagattcgttcttcatctaacaactgaggacacgggaaaacaaaatgatggagttcagggtctcttcaacagaggccttaattccgggaatacatggtgacaagacataggatcatcttaaaccgctcatcgaacaggtacaggatcattcagctccagcagcgtttccgtagatacggcatgcttatgtccctgctgaccactaaacttagctgatcctgcatatgcctccgaaacatgaagctgtcctgcaataaaaggtagaagcatgatagtaaccatgcagagttcacttgccgttgtaacgaatttgcttcctttactctccatgctcatctctcctcatgtctaaatcgggtagcatagtccaccatcgattcctggcaacctaagacgtattttacggataatcgcaatgactttaaacacgttaatccccatttacctctacttgcacatgaaactcacgtataaaaggtcatatgatctttgtcttcgcgataataatccagcctttgcttcatcgtacctgtatgcagttcaaacaaatgaccatccggatcagtaaaataaacagataatgcgtcccggggatctctgggccttccgggaagaatgtcagcccccgctgctcgcagctgctgcacagacgcgtcgaactcctcttctgtaacggtaaatgcaatatgggtataggttcgttccgtatagttgcgaataacatcctcctgattcagggcaatccacagaccggcaagctcaaaatacgccagtttgcgccctttcacctgaattcgggcaccgagagcctgctcataaaaggtaatggcccgctccagattggatacggaaaagcacaaatgattaattccttgaatattcatgtggctcctgacacctccatcgatttaaggatctatccttattatggtatattctgcgcaaaaaacaaccgctctgctgtttcctcccgcaccttcttctgggcgaatgcataggttatccgtatcaatgaacgttcgaggaggatgtaaagcaaatgaatcctgtctatcctttttatggtgagaaaacggtatgcaaggagcaaaagctggcatttccaccccagcatcaggaccagcaacccggtctggaaaccctgatggtgcctgaaccgatcagtgaagatcctgcctatatcggcagctgcaaactccaaggtaaagttgccattattacgggtggtgacagtggaatcggccgggcggccgccatcgcttttgccaaggaaggtgcggatatcgtcattgcttatctatatgaacggacagatgccgaaaggactcgtgaacggatcgaagaactgggacagcgctgtctcttaatcgagattgatctccgcttaaagaaaaactgtgaagccgtcatccgcacaaccatggaaacctacgggaagatcgatattctggtcaacaatcatggcgtacagtatgttcagccaagcatcgttgatattacagaagaacagctgtatcacacctttcagacgaacgtgttcgcctatttctttctgattcaggccgctctcccccatctgtgcagaggtgcctccattatcaatacggcttccattacagcatataaaggcaacacccaactgatcgactactcttctaccaaaggagccgtcgtatcactgactcgtgtactcgcccaatcgctcgctgcacagggaatccgtgtgaattccgtcgccccgggacccatctggacaccgctcatccctgccagtttctcggctgaggatgtacaggtatttggaacagatacacccatgggtcgagctggtcagccttacgaactggcggcagcttacgtctatctcgcctcccgcgattcatcctacgtcacaggtgaatgcattcatgtaaatggcggcgatatggtaacgacttaggctagtgtggaatgtgggtgatatcgttaactgatgtcaggttggatttggcaggtgtggcaggatatcggttgtccagttgcgaagaggattaggagtatgaccggttatgccggagcctgacatcttgcgacaaggagctgaacaacctgatgaacttcgatccactctaccaaccgtacccctcttaccgcgtgcctgtgtatgcgaaacaaggcatggtcgccacgtctcagccactggctgcacaagccggtctggatgtattgaaaaaaggcggcaatgccatcgatgccgccattgcaactgcggcagcactcacggtgctggagccaacgtccaatggcattggaggcgatgcttttgccctcgtctggaccgagggcgaactgcatggcctgaatgccagcggccctgcgcctcagggcatatccattgaggcgcttcaagcggcaggctatacggagatgccgaagcttggggttgttccggtgacggtgcctggcgcaccggcgggttgggctgagctgagccgccgttttgggcggctcacgctggcggaaacgctggaaccggccatccgctacgcggaggaaggttatccgcttgcgcctgggctggcccgccactgggcaagggcagccgagatctatgcacgccagggtgatgcggaggcagggcgggcgtggtttgagacatttgctccaggcgggcgtgtacccgcagctggagagatgtggcgctcgccggatcatgcggcgactttgcgccagattggcgagagcgaagcacgagacttttacgaaggagaactggcagagcgcattcattcctttatggcagagcacggtggttatctgactcgcgaagatctgaaggcattccagcccgagtgggttgatcccatctccgtctcctatcgtggttacgatgtatgggagattccgccgaatggacaaggattgattgctctcgcggcgcttaatctgttgaaaggttacgagttcgacgagaaagaatctgttctggcgtatcatcagcagctcgaagccatgaagctggcatttgccgatggggaaaaatatattactgaagaacgcaaaatgggtgtgacggtggaggaactgctgtccgaggcatacgcggaagaacggcgcaaactcattggtgataccgcacgagcacctgaggcaggtgatccacgtgcaagtggaacagtctatctggctacggcggatggtgaaggcaatatggtttcgtttatccagagtaactatatgggcttcggctctggattggttgttccggggacaggcattgctttgcagaatcgcggacataacttctcactggaccctaatcatgcgaacgccctggagccgggcaaacgaacctatcatacgatcattccggggttcctcacccgtggcagtgaagcagttgggccattcggtgtcatgggtggtttcatgcagccgcagggtcatgtgcagctggtcatgaatacgatcgattatcatctgaacccacaggccgccttggattctccgcgctggcagtggaccaagggcaaaacgattctcgtggaaccgggtttcccgcagcacattgcacaggcactcgcccgcaaaggacatgatattcaagtggcagttgatccatcccagtttggacgcggtcagatcatctggcgcaacccggacaatggcgtattatgcgggggtacggaaacccgagctgacggctcgattgcggcttggtaaaactcgcgtcatttttataataggatgatcaccttatcatccgtatagggtgaaattttaaggcacaacagagatgattcatgtcatctctgttgtgccttttttcgacttctaacatcagtaaacaacatactgtagatatttatgtacccttttaaccagagaaatgtaaaaataatgtgtaattcatgaaaaatacttattttttcgtaaattttcactacataccataaatcacagtgcctttctgaccgatatagataaagggaaatactcaccatacgtgtcatcatgtacacgtcattccctggagctgaggaaccacgtaaaacagaaaaatgcgactacagaaatgagggtaccacacatgaaaacaaacaagaacagacgcgcaggtctaggtctcaccctaatgatgatcctgacggtactgatcctgggggcatgttcagccaacaatacaacaacggcaacagacaaaagaacaaaggttgggatcgtgcttacggaagtgggtctaggtgaccgttcttttaatgatgctgcttttgatggactggttcaggccagaaatgagaaaagcattgtctttgactatcgtgaaccgggcgacaatgccgaagctgcatttgaagagtttgcggaagccaaattcgatctggttatcggcctgagtgatgctgtccaagcggatatggagaaagttgcagccaaatatcctgaccagcagttcctcatgattgacagtcagtccgaactgcctaacattgcctccatttcattccgggcggaagaaggaagttatctggcaggtgttattgccgctatggcttcaacggaagatcatgttggcttccttggtggaatagagataccggtccttcgtaatttcgagcagggttttaaacaaggtgttctggctgtcaagccgaatgcaaccgttgatgtcgtctacgcaggggacttcggcaatgccgagctgggtgaacaactggctgcagagatgattcaggaaaagggcgctgacgtgatctacgtagctgctggtctcacaggcgttggtgcactgacggagattcagaaattagggaaatacgccatcggtgtagataccgatcaattctttttggcggaaaaatccattcttacgtccatgctgaaaaatgtggatgtctctatctataatgccgttaacacgtttgttcaaaacaatcataccttccctcaaaaggaaatcgtggaggggctggcggagaacgccgtgggtctgactgctctacataatatcacgctcagtgatgaacaacagcaaaccttcgaagatctgaaggcaaagatctcttccggtcaaatcaaaattaagcttgatcaataacctatcggatacgaggaggtacgcacatgaaactacagggaaaactgatacttaatgctctaatttcactacttctatgccttgtgctagtcgcttatatcatcatgcaattgctcaacatgaatgccaaaaatcaaaatctggtaccagccatgctcaaggtgagtgaactgaacgccaatcagattcagacccagcaggcgctggatgtctactcgttctccatgacagcaggaaaccaggacgccgtacttcgcttgctggatgaaggccaaacgatgattcaggagcttacggacggattgctcgaaacagatcagcagttacaacttattcagtccatcgagacaaaattagaagctctcaaacagggagccaccgaagcgatgagtgcgatgaacagtgcggaagcgaaacgttacagcactcgggttcggggcatacagaatgatatctattcgttggatgagatgactcgggatcgttatgatcaatataccgtcgatttggaacgtgacattcagcaaacgtggcaaaccgctctggtaggagccatcgtattgcttgtcgccgtaatgctgtttaatatgtatacttcacgtcagatcgccaagcgtattcgaacactcaaagacgccgcgggacaaattgcggacggtgacctgaccggacaattaccggaagctcggggcaaagatgaactcgatgacctgagtcgctccttcggtatcatgactcataatatccgcggcattattcaatcgattggtgaagcgggtcatcgtgtcgatctgatggcgcaagatattgaccgcggtaatgatacagcccaagcgattgtgcagcaagtatcccgcaccacggaggaactctcgataggcagtcaaaagattgccgaggatctgagtgaaacagtgatggttgtggacaaaatgcagtctaccttcaatagcaatctcgagtccacttcccaatcggtaatcgatggtcgtgaagtattaactaccattgaggaaggtaataaggctgtagcggagcaactccgcttggccgaagtgaatcgtacggcgatggccgaggtagaacaaacggtgcgggaactggaagaaagcgcggttcgaatcactacgatgacgacatatgtatcggagattgccaaacaaacaaccatgctctcgttaaatgcctccatagaggctgctcgcgctggagaagccggacgtggcttcgctgttgttgcgggcgaggtgaataaactcgccgaacaatctgcgcaatcggtcaaacatatctatgcggctgttggcgagatcacaacctccatggacaaggtgaagaactctgtagcacaaagcatgcagttattcggcgaacaggaacaagccactggccagactcgcgaatccttctctgctattcgtgaaagtgtggagcgcattagtaccggcattcatcagcttgctgaggacatgcaacactccaatgaactcagtacacaggtgcaacaggcgatcgaaaatatcagtgccatcaccgagcagtcggctgccagcagtgaagagatcaccgcctccacatcggaacaacaacgttccttcgctgatgcaagtatcaaggtgaagtcattgcgtgatatcagcgcagagatgcatcaggaattgctgcgattccgtctgtaagcaggatgccggagaattttgggttggacgtaggtcggatgtcgtttagatatcgtttagatgcagattataggcaggttatgggcaggttatagccgagccaggatcaggtagcgtgaacatacaaacaaataaaggggagccttcgtcatgcatcatgacagggctccccttttcagtaactaatcattgtttcatccaaccattaattcgtttcaaagatatgaaagtatatagattgaactaaacatttacacaaaacagagaagacagaaataacctgaaaaagcggcgctaaaagctatctgaaagaaagctgaaacggaagcatatacttcgcctaaaagctttttgaaggaaagctgcttcggaagcatacgcttcgcctaagagctttttgaaagaaagctacttcggaagcatacgcttcgcctaagagctttttgaaagaaagctacttcggaagcatacgcttcgcctaaaagcttcttgaaagaaagccgcttcggaagcatacgcttcgcctaaaagcttcttgaaagaaagccgcttcggaagcatacgcttcgcctaaaagcttcttgaaagaaagctgcttcggaagcatacgctatcccggatttcctaatttataaaagaaaaaactggggataacagcgatcggaaggttgttctgtcaacagagtgtctagtgtaaatattctttagttcaacttatatagataaaaaggcatcagcgtttcagatccaaacgtttaacgaactgagcaaaccttattgggccattaattgcagattataaaatctaacgaatctcaggcattctattccctaatttagtccggtttttcaggtgttttatctgaaatacacagaaataacgtggatgaggttcgttagcttttgctcctcgatgtaaaccgtggtataaggtgtatcaggttcgttagggcactgggaattgagcaatgggtattgagcaaatgagtactgagcaatgaacaatggacaatggacaacgttcactcatttacttttggtgcctgcttcgttggatcacttgcagtctgaaaacgaaccgtcataggtagtaacccaaaaccgcgagtttgtcccacacctgccccatcctcacagtgcatcaataatgtctccggccagcagggacgatgggtcaccgcgcagcagggctgcgcgttcagcggcctgtccgtggagatatacgccgaacgtggcggctcgctccgcgctgagcccttgggcaagcagaccggcgatgatgccggtcaatacgtctccggcaccgccagtcgccatgccggcgtgcccggtggtgttgatgtacgcctcgccggacggcgttgcgatgaccgttcgtgctcctttgagcacaagggtcacgccctgctcgcgggcgtattttgcagcgtgcccaatgcggtcacgctgcacctctggggtcgacatgcccagcagtcggcccatctcgccagggtgcggcgtcaggattgtcgccgcacttcgctggccccagtcgcgaggcccatgtgggccagcgtctgccagcatgttgagggcgtccgcgtcgatgacgagcggacgatccgattgttgccacagacggcgcagccagtctgtgtcgccctggaagcggccaaggcctgggccggtcgcgagcacgtcgcggctctccgcaagacgcagcacggcgtcggcggaagccgcgttccattcgccgctgtcgccatcggaggcggcagcaagcatgagctcgggcacggtgccgatgacatgcggcagcagtgccgcgggcagcgcccatgtggcgagcccgcagcctgcgcgcagcgcggccttggccgagagcaggccagcgccgctcatcggcagacttcctgcggccaacagtacgtggccgtaggtgcccttgtggccgtccggtgcccggagacggcctgtatccacgcgcagcgcaccgcgcagcacctcgtccgtcagcagacggaccgaggggccatgctctggcgcaagccgcgcgggaatgccgatggcgcgcaccacaatgcgccccgcggcagaagcgcccgggtactgcaccagcccgcgcttaagcagcgcgaggcatacggtcacccgggcttgaatgcagggctcgtacacctctccggtgtcggcgtccagcccgcttggcacatcggcggacacgaccggcttgccgctgtcgttcgccgcctcaatcaacgccgcgtaatctccccgcggcgccccccgcgagccggtgcccagcagcgcatccacgatgcctgtgcaccggctgaagtccacggcttcgcgcccgtggacaagagcagggatgccaagcttcgcggcggcatcccgttgcactgcggcttcgccccgcagtgcatcaggggcatcggcgtagaccaatgtcacgccaagccctgcttcaaccaaatggcgcgcggccactagcccatcgccgccattattgcccttgccgatcagcatgtaccactgctgatctcccgggcgctccatcaccagcgccggatcggcgatgatgtcgccaccataaccttgccgatcgccgggcccggtgtgtgcccgcctcgcatcggtctggctgctatagccaagctgccctgaatccacaagccggccttctgcctgcccttcccggcacagcttgatcacttcctcagcaatggcgcggcctgcattctccattagacttgctgccggaataccgagctgatgaatggtatactcgtccacagctctcatctgttcaccggttacgataaacaacgttcatccctccccgtgacaagctcatctcatacttaaaagtagcaactttgcacctaaacgctgcatcttatatgtgtatcgctatctttcctcttacctcatccagttaccacgatccactcgatacatcatccaaaactctatcgatcccgtgtacgagaccttcagattaaatcatccattccaaagcctgtttacacttaataacctaccgtaaaccgtgcttgtataaattgcggatcgtccagttcgtccaccaaagccgctgcaaaatcgccaacggaaatcgagctttccccaatatcatccgtaatcacacggttcatgccaacccggaactgaccggtacgacgtcctgttgtgattgtcgcagcagggctcatgtaggtccagtgaatacctgatgcttcaatcaggtcatatgcttctgcatgggcttttgccagtggtttgacttcttccgggaatcccggcgtatccatcagcatatcaccggaatcggttagcaaacttcccgctccaccaactacaaccagacgtcctgcttttgcccggcgcacaccctcgatcaacgaacgtgtcacttccagcatctcttcttctccaccaaacttcggtccatacgcactcacaaccacttcttgacccgctgcaaaatcagccacctgatccgggttaagcagatctccctgttctacacgcaaacgctcatgaaccatctcaaccttcgaagggtcacgcaccaccgctgtcacttcatgcccacgatccatcagctcccacagtatcatcttgccaatcgctccggttgctccaaaaatggctactttcatatgaattccctcttttctgtagatatcatcttgtcaacttaccgttattttaatacttaatcctattgttatataccttaaacggctcacgccatcttaaaccggatgtgacatcttgtaaacctatctcttacagcttatatgtagaaaaataatctttacttcaactagccggaagaagcaccgacactcttaagtatcccctctctccgcaagcactcaacacgaatcatgaaaaaagccgctaaatgcggctataataagataatttcatacgacataaaatctattcttatctcaagatttcagtttccgttccgctaggtagtcggtccttcttctccctgcctccaccacatgccctccgattttgggctggtgtattcaaatccaaattgagcataaagttgatcagccggaacatccgccagcagactgaccaaaccacgggcaggtactgctttacgcagataattcataatctcgctcatgatcagttttccataccccattccttgaacatccgggtgtacagcaatatcgacgacctgaaagaaacaacctccatctccaatcactcgccccatgcctatcagcatatcctcttcacgcagacatactgcaaacaagctattccgtaatccaatctctgccccttccctgctcattacactaaggccggcaatctgccgtaaggcaagatactccaccgctgcgggtggtgtgtgttcaatactcacatgatccatgaattgtgcccctttctgcttgaattcatctacttcctgtgtaatagtgagagaaagcttacgtgaagcgtgtttcatgatacgcgaagttggtgcaaaggaggaacaagtgtgtttcgttggattgaagatctaacattgcgcccaggcactgtggctgtgctgtttggagtcatggctttgcttctggggatatacatatggtctgccactgaagttcgccgcagccacgaaaggcgaatgagaaggatacgagatacattatacataagtacagccctcttgggacaacttaccatccaggaaaatcggaattatgaacgatcggaacacgaacatgacgatctgataacagcaatgttagcctgcaaagctgcatcttacctatctcctcagctacaggaccagatccgtgactgtattaaggatcatgaccctgccagaatcggactgatgcacagagcactggaacgggaatgcaccgtattatcggatgaactcagccgggagactcatgcagatcattggggcacagcggtatggaccatccttcggcctgcagccgaaccattggcactagcagccacagggtttctagttacagatctgatatttcgtcagcggatgttggacgtccatgtagactcatgggacagcatcttgccatggattcgcgcaacttccataatgatcaccataatatatggttacctgctctgggccagcccacgacgggataggtcaagtacagtaaccaaaatgctctccttgctgatcgctctatgctccttgctccatctgattggacctgttgctgcaccctatacactgggacttcagctgattatattcacttcgggtttcgggttgactgggacgcgctctcgaagtgatcgcccctacgcaggacatacggatttggaacctacgaagcaagtctctacggaactggaagggaatacacgtcgtacatctggtaccaacaccgacgaataacctacgcatccagccgcttccatatgattaaacttagatacccacctcgatgacacgagacttggccctccctcggctggattttcacagatcaggtcatgtctccttactcggcattatacgatgatggatgtagtgtcgcaaaattatcgagctcccgtctggctgatcctattgagtagccggacgattttctaaggaactcaggacgtcttatattacctctacagcctctttcaaaattgtaaagaacctcagacacgttatttcccaaaatcgctcgataaaaacgctctaaaacgccgtacatttcgatataacgtgtctcagattccttagatttctgcgggtgcttcaaacccttgaataagacgcctcagtttcgttaacgctcaccccctgctcatgctctgttccaaacgcgactgagaggaaacctcgtgtccctctcgtacgaagcgaaaattctcattggtagtggaaaataggaaaatcgcttttgcaacgtcctaattgcttgctcttacattcagtatttagcgcttgcctactccggacacgttcagatacacttcggctttcagcacgtgttgaaaacatcccctatatccaacgtatctgtacgcaaaaagggcttaaactacattgtagtttaagcccttttctataatcttttcttgcgaagaattgaacgatataaaacgaactttaataactacacaaaaacggagagggcagaaataacgtgaagaagcgaagctacaagttttctgtaagaaaactacttcgaaagcattcgctacgcctaaagcctttcggaaagaaagctccatcgaaagcatatgcttatccccggattttttcctttgaagaaggaaagaatctggcataacagtgatccgaaagttattctgtcatcgaagtggcatgtgtgacattctttagttcactttatatcatggataattacttcacttatttggctacaacatgtgcaatgacgcgtcccttttcgtacgtgacagtcacgtcataaccttcggcagttacactgtcgaattcacctgtaattccattagccgtgattaacgtaatatctttggcaccttcaatcttatagttggacaagtcgagtttgagacttcctccatcaatatagagctttctgccgacattcagctgactgttgttgtcagtcactaccaattccaacgtaccgttatccatggtaaagttcctatttaagttgagtgctccgtcgacatcaacgacaactgttccattttctacatacagatcacctgtaccaaaagccgttgcagattcagctaccagcgttcctgcttgcagcaatgttccgccagtgtagctatttttccctgtcaatgtaagggtgcctgttccttttttcgtaagcattccactaccggtaatatcatttctccaccagtcttgtgcattgaagcgccctttggaagcgtccatatccacagttacattgttcaagaatgcgccgtagccatccgcagccgtgaccagatcaattctaccccagcccttggattcatcaagtacaggatatccagagtcaatggatgttgtatacaatacttgtctgcgttgctcatctgttaaatacggttgacgtgtttctaacagggcttctgctccttgcggtacaactggagccaaacctttggttccggtttgtggtagaccgtaagtcatcttttctctatagaaggctttattggcatcatgatcttcccatttgtgttcatcgtaagcactcttgaacgtgtaatcctctgttacggtgtgtgcatactcatacaggctcatatttttttccttggctgccgctccaaatacttctcctgcattctcataacctttctctaacacatctttattctcagcctgattaagtgcatatgcagccatggctgtggattgtattcttcctccgataacatcaagcggtgagtgcatccccgttacgattcgattctcgcccaactgagctgctctcgttaacaattcagagaatcgttctggcgtagcgtatgccaaaggaaatacggataagtaagctgcactggtatgtccgctcggaaatgcgccatcttttcctcttccatcctcagcgattcgtttgacataagttaacgcaggaataagcttaacgttggtttcgtattgctggtaatgtttttctcctgttgatttggttccgcctgaagccagaggtacttcttttttctcaccttcacctaaggtttcccatacaggcagtcctttgctgtcaacaacttctttcacttctccattggaattcattctccatggtctaggggaagagtagaaatatttagaaggattagatgaggcaggaattttgaatcgaaccagatcaactaaatggaccaagtctgaaagttccgtctttgcttcccaatctccaatgccttggctttcatcttccactgtttcttcggtcaataccacattcatttcgtccaccgttcgttcaacgtttgtctttggcttgatgatatctacatacgtgttagccaacggaccaaagccctccatcacgctatagatcttatctctttggtcatcatagtaggctgccaatgtctcttcacctgtgcgattttgcgtgaccttttctacatatttgatattggcttcccaagttgctttgtttcggatctcttcttttgcatatgttttctgatcagcaacagctacggttggatcattcttaaagccgtcataatatggagtcggtccatctccatactttgcatttttcccgtcagctccaattttggttgccgctgttccatctctccaatccgctaggttcatggaccatacttgatcaaaaccgtccaagatatcaataaacggattggtttccgcaatatttttcaaggtgtcttctccggcattggctccgtgcttcacggcggacaaccgagcttcatctgctgggggattaacattcagcacagttgccgttccctttggcttagctggtttggcagctgtagtagcatctgtttccacagccttaacgagcgcagacactgcttcggcacgagtaatggaattaagcggtttgaagcttccatctgcataaccagagataattttcgctgctgccgctccacctacagctcccttgctccacgccgctatagacgatgaatcgctaaatacattcgctgctgtttcatttaactccagattcaaaatgccagcaatcactttagctgcttcttgacgggtgatcggatcttgcggcttcattgtgccatcggtgtatccatctatatatccattcgcatttgcaatagaaattgcttcgtaataccatgcactctcagacacatcgttaaaggtaattttagcttgtccggaatatccaaaggcaccgtttaccaaattcataaattctgctctggtaatatacgtatttggtttaaatgaatgatccaggtaacctcgaattaatccttcatcaccccatgcttgaatattcgcttccgcccagtgtcccttaatatcagagaactgaatcttctgatcggctgcaaaactcttctctgcaaatgtcggacctaccatagacaacattagaagtaatgccagtgactttttaagtggttttctcatggcttgcaaatacacgctcccattatggtaaattatttttttgcttctgcatctgcaaatgagtaagaaagactctatacagatgtctgatctgccgttactgtagcattagggagcgtttcgcatctatagaacaaattccgttttatatcaaaatcgtacgttccggagcttatatgccaagaaaaatggagttagatactacatttatcaattaaaatacctacttttgtaaacgctttattaactgaaagtaaattatggagtgggagtttgttaaatttcgatcaacatgatttctagtcctcggcctgctatataatgatgaagttgtttagaaacgagacatgaagggggaaaaagaatgcataagccatttcaaactgtaagatccaagatggttctttcctaccttgctgttgttcttgtcattgcgcttcttttcggctccattctatacctcttcttctcccatcaatacagcaaagagattcgaatcaataatcagctgtcactgaaaagcactgtcaatactattgagagctccgttatccagaaggtgaatcaggtctatctgtccctggcactcggtaacgccgctagtatcgatctagatagcttaaaaggaaaccatagcaaaatcctggacattgaacagtccctcaaaaatatggtgcaaaattactccgatctcattgaagctattcatgtgtacgatacgaagaaccacttcatcgtctcatctgtatatgggctattgctctatgaggacacgccttcgagtgtggatcatacgacggattggattactgcgatgaaagagactccagaaagctccttatggatgaagactcgcatggtgcctcaggatgcttatatcgaatcacgggaacaaggcaagatgagtcctctaatttcctatgtccatagttacccgtttcaatcgtctggacaagacagtaaggccatgattgcgattgatatcaaagaatcagcgatcagtcagatcattaaaaatatgctccctgctgactatgcaaatacattaatcatcgatcaggacggaaccgtcatatctgccgcggacaaaacgttgataggtagctccacggaggagaatctgacgcagtcgctgctcacctttcattcttcagatgagagcttcacgcctgtatttaactatgactctcatgtcgttacccaagatcaatttaaaggaaatgcatggagaatctacacaaccacacctaatgaaagcttctattataaattggatagcttgaaggagatttcggttcttctcggtttattggctgttgcggttggaatagcgatgtcgtccatctttaccagggccaactatagtcctcttaaacgaatcatgaataacatcaagagccggatggatagcccaaccagcttaaagcaggacgaatatcggttcatcgatacaacgtttaacagtctgtccaataaagttgatagtcttgaagaaaccttacaagccaatcacagaatgattaagcatagtatcatgctcaatatgttaaataaccgatttacacccgaggaacttacggaacagctccaatctgttcacatttcaatggcctactctcgcttccgttgcatcgtcattgaccctgttaatgagaagtggaaggatctgcagccaagacagttgcagcatacgttgtatacgatgatccagcaactggagatcgtagaaatggatggaactcaaatgctggcagaggaattgcaggatcacaaaatagcagtaatcatctgtaccaaccaacccgaagaaccgctctctgatcacattgtagactttattcacgctgaggcgagcagcagatttggtctggaatttgtactatcgttaggcggatgggtagagcacttcacgaagattcacacaagctatcatcaggcgaataccctgattcgatacagctacttctttcccgagcagtctgccattcaggatcttgatcttctgaacagggaagccagcagtctggagatcccggagtcatacctcgtaaactttgaaaagaaattgcagactcgagatgtgcaaggtacggttcaggccattcaggaattggtcgcgacaataaaagaaggcccctattcagccgaatacagtcggatcatcttattaaaaacggtatctatctacgctgagtgtattaatcaggtgcgcctgcaacccaccgaggcgagttcattgaatatgtacaagcaattttcattgttctacaatatcaaccgctattcagagtggatgattcatcttgtgaccgaatttgtgatgcagatggagaagcgaagcgaggtacgaagtgtggatacgatctcggctgtcaaagcctatattcacgagcacttatcaggcgatctcacgctggatcatgtctcagagcaagtattcatcagccctaaatatttgagtaaacttttcaaggaagaaaccgggattgtttattccgaatatgttacgaatcagagaatggaacgcgcacgggaactcatgacacaacgcgaaattacggttgagcaggtcgcaagtacggttggttaccgtacccctgcttatttcattaaaaagttcaaagaaatccacggctgtacaccaaaaaacttcatgcgcaatttaatggaacaggggtctatatagggtcaattaggaatatttacacaaaaacggagaggacagaaagaacctgaagaagcgaagcgttcgcctaaaagctttctgaaagaaagctacttcggaagcatacgctattcccggatttcttcctttagagaaggaatcaaaagaaatctgggaataacagcgatcggaaggttgttctgtcatcggagtgtccgtgtaaatattctttgattaaacctatatagaatttgaaatcaggaaaggagctgctatgaacatcaaccatttaagaacgctatgtctattgattgctacatctattcttataggattgatgagcggttgtacctttctaaacagggaaggatcacaagtgcaacagcaggaacatttggcaagcgctgagaaagatacagcaccgcagtatacgatatcctggaccatgcatcaaaatatccctgttcctgaagacgccgagatgattacatatattgaggatcggtttgatgtagatctgaaggtgtggaatcttgagaacaagcggtacgaggaactgcttgatctggagcttgctcaagggaaaatacccgatctgttccgaatcagacaaccgcatgatctgcttaagtatcaaatgcaaggggtcttagcggaaatctccccggaagtccttgaacaatatgcgccaaatatcgtacagcgaattcgcgattatgattcacgttacctagagtatggaaaaataaacggctccttatatggaattccggccattaatcagaccaacatctatcgaacccctgttgtataccgagaggactggcttaagcagcttggtctggaggtgccaaagacattagatgaatttgaaacggttatgtatgcttttgccaaagatgatccagacggaaatggtaaacaagatacgtatggcctatccagagagggcttaaatgtcgtgtttggtgcctttggacagtccgtattcaccgagcaactgtattttaatgaaaaaaacaaccaacttgtgatcggtgctttggagcctgagatgaaaaaagccctgacttatatgcaaaagtggtatcgggacgggattatcgaccctgagttcataaccggcgaaaataaaggcggctataaacatctatcccatacttttattaatggaaaaattgggatgacctcgatgggcaactattatcattggaatcaagagggagactacagtgtccttaatgaaaatggccaagaaacccctgtgggagcctcgttcaatgttaatgagctgttacagaagaacgtaactgcagaggttgtatttggttctcctgttattggtcctgatggacatagcggttcaaaagggaacaatctgctgatgaattttattgctataggtgctgaggctgcgaaggagccgggaaaactggagaaaattttggagatactcgattatgtaagtgccaaccccgatccggaggagcagatcaaaatggagtatggccttccaggaaaacactggaattggagcgctgaagattcaaactcgttccatttactttacccatacaacagaatggagaattatattaatatgatcggctcaagtatcggcatgacggttccaggtataccctcggataaacgtgaacagtgggctgcatctgcagggttgacggagaatggtatctataatcgcctggaggttgcaacccctgccctgattcaatattcatctgaattgattcgcatgagagacagagcgtacatctccatcatcactggcgatcagcctgtggggtatttcgatacctttgtggaagaattcatggatgcaggtgggcaacaggtgctgcttgaagcaaatcattggtataaggagcatgtggagacaagtcgcgcacaatagatataacggtttggaacatacattatgcatttcccatgagtttctggattttacatgtgtttttatgcacctatcttcgcttccttcacgtcactctctatcccttcgcactcgcatttgatccgcgtagtgaacgggctgaactgcttcgtgccgtgcttccggatttggaggcgctgcctgagggcgtgttttcaaaacgcttgcgttcggtccgctccatctgcacaatctgaccttcgtgcaccacgatatgcaatgaaccaaactccatgtcattcagctgtccggcaattcggtccaaccatacctcatccacttttaacggcttagccatagagccgcctcctcttctcgggctattgcccgccatattcctaagtacgctgtcatccaacggatttataaatcattcttatccaacctatatacttggtttatacattagcagggcttccagtagctgtcaatctgtattttcttcttctcataatcacttttctgaaacggctttgtgtccaagccagcccttgagtagcaacgtggcgagagccagaatcaggagcagggaagctacggcaaatgaagccgagaattgatattcgttatacaaaatctcgacatgaagtggtaacgtattggtctccccgcggatatgcccggacaccacagatacggctccgaactcgcccatagcgcgggcattacacagaataataccgtacagcagtccccatttgatgttgggcaaggttacactccagaagattcgccacccggaagcacctagcgtaaccgccgcttcctcttcccgggttccctggtcctccattagtggaatcaactccctcgctacgaacgggaaggtaataaacagcgttgcaatgacaatgcctggcagcgcaaaaatgattttaatatcatgttcggacaaccacggccctaaccacccattcgaaccaaagaccaatacaaagatcaacccgcccaccacaggcgaaattgaaaaaggaagatcaatcagggtgatcatgagtcccttgcccttgaactggaacttggtaatgacccatgcagcggccacaccaaatatcgtattcagcggcacggtaatcgccgcaaccaataacgtgagtttcagtgcagacatggcatccggctcggtaagagccgcaatgtacacaccccagccctgcttcaacgcctccatgagcacaatggccagtggcaaaataagcagccatatgagtaccaggcttgccagtccaatcaacaaccatttgacccatggagcttctgttgttgcacggttagttccacgcccggtctttacgggtggaacagggctcagtggaacggaccccgccatatgctgcacctcctttggtttgggtgagtgacatctgaatgtatccttaatccatcatgcttcattgtcatgctctgcccgccttccggctccaacgttgcaaggaattaatgatcagcagcaggatgaaagaaaccagaagtagcaacaaagctacagctgtagcacctgcataatcgaactgctccagcttggccatgatcagcaagggagcaatctccgttttcatcggcatattgcctgagataaatacaaccgagccatattcgccaatgccccgggcaaaagccagagcaaaacccgtcagcaacggtggaatcagatctggcaacagaatcgtgcggaatatccgccatcttcctgcccccagtgtggcagccgcctcttccacctcagcttccagctcctccagcaccggttgcaccgtgcgaacgacaaacggaattccgataaacatcagcgccagcgtaatcccggcctgtgaataggcgagcttgatgcccaaaggctctacaaactgcccaatccagccattgccggcatagatcgccgtaagagcaacccctgctaccgctgtcggcaaggcaaaaggcagatcaatgaccgcatcaaacagccttttgccagggaattcataccgaacaagcacccatgccaggagtaaccccagcacgagatcaatcagcgccgctgcacctgcggtcaggaagctgaccttgaatgaagccagcaccctgggattggtcgcaacctcaatcatggttgcccacgtcagccctgttgagttaaataacagcgcagccagtggaataagtacaaccaggctcaggtagaacacactgtaacccatcgttaatccaaatcccggcaatgtgcgtctccgcgccacaaccaccttgctcatgcacgttcatcctctctgccttcagccggtaaggctggttggccgctcacagcgcgattgatcgggtgttcattgaacagagcaaccttagctgcctggaacatagatctggtcgaagataccaccgtcattaaaatgtttggcctgagtatcccgccatgtgccgaacacatctttcaacgtgaacagttcaagcgccgggaactgatccttgaatttttcctccacgctgtccagcgttgggcggtaataattttcagcggcaattgtctgcccctcttcactgtacaaatatttcagataggcatccgctacgtcgcggcttccttttttgtctgcatttttgtccacaattgcaacgggcggttcagccaagatactaaccgaaggcacgacaatatcgaatttgtccggacccaactcttttaccgataggaaagcttcattctcccaggcaagcaacacatcaccaatgccacgttcaacaaacgtcgtcgtagacccgcgagcacccgaatccagcacaggcgcatgtttgaacaattctccaacaaattccttcgccttctcttcatcattgttattatgcttaagggcatatccccatgccgccaaatagttccagcgtgctccgccggatgttttggggtttggtgtgatgacttgggtatcccctttgatcagatcatcccagtccttgataccttttggattacccttacgtacaaggaagacaatcgtagaggtatacggagagctgttatgctcgtatttgtcctgccaaccttcgttaatcagacctttatcttcaatcgcatcaatatcgtatcccaatgccagcgtcaccacgtctgcatccagtccgtcaataacagaacgactctgtttacccgatcccccgtgggactgcttgatggtcacttcctggcctttctctttcaaccaatgcgccgcaaacgctttgttatattgctcatagagttcccgcgttggatcgtaggaaacattcagcagttcgatggccttggcaccttctgtgccgccttccgctccccccgatgttcctgccgcactggacccgccgctatccgatccgcatgctgccagaactcctgttaataccagtgccagaccaaccaaaatacccttatgaattctctttttcataaataacactcccccgatatagatctgcatgactacctcaggccggctgaacaggatcaaacgccccgtaaaaaacaagaagacggaggaacccccgcgcacttctccccataaagtcatgccggcttaaggccgtgcatgctccatctggaaaggatgcgctgcggtgttcctccgtctatacggtgagaacgttattctgttcaggttgcatggttgcatctgtctgtaaaatgatcgttttcacaatgaaaacagattcatttttattattcctacccgtttagtaagttatatacgtataataaaggcagtctatatacctgtcaaacgttttttccgatttttaccggatttctggcctattggtaaaaaaaagaggaacaacgaaccagcgtccgttgctcccttcagcgaatcccatacttcgctggctattgtaaacatgaacggaattggaaggccataccttgtccattcctcatctgcccgcataccggatattgggtactggtggtgtgctcatgccttctcccagataaaaaccggtgtgtggcggttggttgtaggctacattttgccaagcgacgccaagacggtacaccggatcatgcatcagcgtatagatgcgtttgtccgtaactgctgttgtggtatagatccgcagtgctgagctgtcattcgtccgccataccacttcttctctccagtccccgaacagatcggcctgcagattcggcgtagacttggttccgttattggaagatacgccggaagcggtgagcaggttcatcgttgtgctgttagcatagttccacttatcgattcggttgctgtccagcagttcacggagcagatccccatcccaccagatgccaaaatttgtggaggacggtagggttgtcccgagtttctgccctttggctgtatacagactgccgtctgcccatacttcagcgcctttatatcttggatcgatatctgccgccatgccgcgtccaatatcctttgttgttttgactccccagattaactggcctgtacctgcatcacggaactccactccggcattggacggtgtctcatgaacctgaaatacctcaagtccagggcggtccgggtcgaggtcactcagatgcatggcatcgccatgatgaagtcctgttgtgtacaatcctttgccgttatcatccactgccatggcaccataaacgatctcgtctttcccatctccgtctacgtccgccacactcagattatgattgccctgcccggcataacccgagttaccggaggtattggaatcaaatgtccattgtttggtcagctgtccattccgccagttataagccacgagcactgtgcgggtgtagtacccacgcgccatgaccagacttgggcgctctccatccagataagcaatggcagcaaggaatcggtccacccgattgccgtagttatccccccaactggatacattgccacgcgccggttcgtagttcaccgtggagagtgctttgccagtctgcccattgaaaaccgtcaggaattcgggaccagacaacacataaccgctggaattgcggtaatccttgcttgcatccccgatgaccacgccagtgccatccttggtgccatcggctgttttcatcgcaacttcggctttgccatcaccgtcgagatcgtacaccatgaactgggtgtagtgagcacccgcacggatatttttgcccagactaattcgccacaggcgtgtcccgtttaatttgtaggcatcgataaacacttccccggtataaccactctgggagttatccttagcgttggaagggtcccacttcacaatcaattcatactcaccatcaccatcaaggtcacctgcactggcatcattggcactgtagctgtaggctactccatcgggtgttgtcccacctgcgggtacactgagcggtacagatagatagttattgccccatacgcttgctgccgctgaagcagcctgctccgttccactgacgacagcgcgaaccgtatatttggaactgcttgtcccgcttgcatcctgaaggttggtgctgtttgttatgggcgtagcgttcaccttggttccatcccgatagacgttaaacgatacattcgacccttccgttcccagaagccgccagctgacaaacacacctgtcccggtcttcacagccaccacaccgcgatccagatattccatctgccgtgctcccgctgcatgtgttaccggcgtgttaccaagtccaagcgaagtaaccagtaacgctgaactcagtaacgatactccgactgtacgtaatgtgcgcttccacaatgatgatcgattccccataaacaattgcctccccaattggtttggtaagcccgatgcccttgtagcgccatctttttatgtaagcgctttaatatatttattttaaattaaacatataattccatctataggtctaatttagtaattggatggtggtaaaggaaaaaagccaaaggatttttccttcgactgcgttaagtatattacagtttaatcataatgctaaatatgctaaatagattcagaactgaagtacttctattaagcattaattcgctgcatttcattaattagtaatttaagcttttccttgtcttcaaaattttcactactaaagcttttttcaagaaaagccattacatatttaataaaattgagatcattatttttttggatagagaagttcaatccttctaaaattcgacttattgcaacatcgcgattgtggtttaaatagtatatcgccaattcccctagaagttttgcataattttgatccatcattgaagaattgtattgtccaaattctgtcttgtatgtacgtaaaggaatgtaatccgagaaacgctctaaaatatcatcaatattccagttaaacttattcgctgcctggatgatgtaacgtaatgccaaaaatatctcatccgggtattgtgtgatgtaatttgcatattttttaacaacatttatatccccagataacatctgatagagatacttattagccgttgcccattcttcgaattgcttcagcacacgtcgagactcctcatcgtcctcccgcacccagctctgtccacttgcataaagccccacaagttctaatgctttgtcatagtctccctgctcctcaaataccgtcgactgaatcaaccaagcatatagtatataaaagtaaagtggccgtactgttagtttccactcctgattttgtcgttccgaaatgttaattgtattatattgaattttggctaactgtagcatcttgtcagcgaaatttttaacttcgctccatttatttaccgagccaaaagcatggattagatctttgaaggcttcaagttggtacccctcatccaaccggtcaacatagggctcgaacaagatagccatccttagattttcctccaggttctctccttgtccaattagaaacaatcgatactgacacatcgcaagccgttcggaatgctgatatttctcaacttcactcacactcttatataacaatgccgccgcagaccgctgattttgttcaaataattgttcagccatctcaaatagttctgtcgcataatccaggtcgtccagtagccgataaagaatctgttcaatgcagtccagccgattcaactccgcacttcggagaataaacggtctgatccgccgcatggatacggaataagcaaaacattcttccacatagtcggcaaaaaaatgatccgctgccacgcccattcctgatgatatcgcaatcaactgactcacggatatgggacgattcccatttagaatacgactaactgtgcctgtattaatgccagatacttccgagaatcgggagagcgtcatactgttcttatcgataaactgggttaattgctcccgaattgaatttgcaggttccaaggaaagcaccacccttcgtgtaacatccatattttaggttttttcaccctatattatgatcataatgaacgttcgaacgagggtcaataaaaaatgttataatatccaccattttcaagttactcgcttaaaaagcctaaaaaagctgtaaaaccatgtgtttctccatgatttcacagcttatagacaacttttataccacaggcgcaatacataccggacgaggcagttccagcttgaacccgttatgcgtcagacgtccgtcttcttcactgatctggaaacctacgaggttattgctgtcctgattcgccacgaccagaatcccgcctggcaaaatattaaagttacgtggtgtctgcccaatcgtggacgtccactctacagcttccaactcaccgctctcctggtcaatatgataaagtacgatgctgtcatctccccgattggatgcatacaggaaacgtccacatggagatacacggatgtctgcagccgtaccctctcctttatgcccttctggaagtgtggaaatgtgctgtaccgtagtgaactcccctctgcgctcatcgtacaggaatgccgtaaccgtgttgtccaattcgttgattacatatgcccacttcgagttgggatggaacacaagatgccttggccctgcgcctggtggctgatccatctcacgatgggtaaccagacgtccctcttccaaccgatacacaatgatctgatccagaccgaggtcacatacgacagcatactgcccggacggatcgggttgaatggagtgtgcatgcggcccttcttggcgttcttcgttgattccacttcccgtgtgctccacccatgcactcatctcaccaagcgtcccctgatcgccaaccgggaatacattgacactgccgctgctatagttggatgagaacacccactgaccatccttggagatagacacataacatggagaagcccctctggtctgttttcgatccatcaggtgcaactcacttgttgccgcatctctccgatagaccaacacctctccctcgcccgtttcactcgccacatacagacagtttccatccgggcttagcgccagataagacggattatccacaccatccatgtgattgacgattcgcatctctcctgtatccgcattcaacgcacataggaatattccgggttcatccgctgacgcatacgtacctgtatagaaaagcgtttcctgttttttgactggttccatatctaaatctctcccttatcttgtatattcactgttctgattcttcccactggtatgtacttacccaattcacgggcaactgcttcacttcctgtaacgtggctttctaaatcgagaacacctccggtgagcgctctcatatctgtcattgactcccttatcgcctctcaccataatacaaagtatgagacctaacaatagaccacccctacagcgtaaatctgacggatttcgtatgcaaaaactcattgtgcttccggactccctgctgcaagaaaccgcagcttatccggtcacgtccggattatatgttaccgatatcggttactttcacgaggcagagcatcattaccgtgaccgtcccaatggttgtgaatcacacattctgatgtactgtgtccaaggcacaggctggtatacgatggatggcagtaagacatatgatgtcagcccgggaaacctcgttatactacctgcacatgtccctcatgtgtatggtgccaacgcagctgaaccatggagcatcttctggattcatctgcgcggggaacacgctttatcctacatagaacccttgttaactcatcatattactaccatgccaccggcgaaggctcagaaatggcttgagctgttccatgaatgttacggcgcgttagagacgggttactccatgcagacgatgacgtatgcctcccagattatcggttatatgcttggtatgctcgcttatggaccggagacgacaggaacagatggtgggatcgtgagcagcaaacgtgcggccgaacaatccgttcaatatatgctggagcacctggagaatggaatcaccctcaaggaactggcggctcacgcgcggctgtctgtccctcattactctcagttattcaagcaagctacggggcattcgcccatcgattatttcctgcggctgaagattcagcattcctgccgctatctggattttaccgattggaccgtgaagcagatcagctccgagcttggattcaaagacccatactacttctcccgtctgttcagcaaaatgatgggacgttcacccacggattatcgaaataaatccaaaggttaaaggcagtgccttcacttagccctttctgaataattaagaatttcagttggaaaattgcagcaaccttttgaacagaagggtcgtctataggggcaaataacttttatataaagggatcatccctggaaaagtgaggcgaacctatcatgaaaaaaaatatacttgctacattaactgcgggagctctgctcacgctgtctctaagtgcaggcccgatcaacgctgcgcaggcccaattcacggatattcaaggtatcgcaggagcagacaaaatcgaatctctccataaagatggattcatcaaaggtgtgagtgacagcttgttcaaacctgaactggagttaaataccgctcagggcattcaactgattgcggacggcctgaatctgaatctggacacgattcgttttatcaaaatgccggtaccaagtgactacttctctgctgtaaaagatggcgtatggtacagtgatgcatttatccgcgcacaatataatggcattcagatgtcacagaatatcgatccgtccaaaccgcttactcgtgaacaattcacacttttcctgatgcaaggcatcgaagccaaaggcggtctgccaatgattaatatcaaacctgtggacattaccgacgaaaaggaacttacgccagagtatcaaggtgccattcagcgttcactcgttctcaaaatcaatgaactggatgccgacggaaacttcaatcccaaacaaacgattactcgcgccgaagcagcagtgatgatgtataacgcaatcgagtacatggaatcgttccatgcaccacaaatcccggaaacacctgagaagtaatttccttggtggaagcagtatgccaaacagccgcaccttccctcaacaggaaaatgcggccgttttgtattatacctatatcactgatgcaatcatcagatttaactttctaacttagaaagaacctttaacaacaacctcagacaacggtaaacgtcctgacgggcgagctggctgtgcagctttacctactgtaatcaacaacgttggcacaaatcgtgcaggaatgttgaatgtttcgatcagtttttgtggattatatccaccgattggacatgtatcgtaacccagggagcgtgcagcaatcataatattttgggaagcaaaagatgcattgcggatcgcttcatcgcgagcgatttgcgggctttggtaagcaccgttgatctgtccaaccaatgcgtcacgaacctcagcagtcagtgcgcctgcttcaacagcttgatcgtagattacagtgttacggtttgcttccaaatctccaagaacagcaatcgtaactgaactttccacgatctgactttgaccgtaagcaactggcagcaatttcgctttgtctgcttcggattcaatcacgaggaatctccagtgttgcaggttccatgaagatggtgcttccgcagctgctgtcagaatcgcattgagatcagcttcaggcaattcaaaccctttttcgtactttttgacagcatggcgttcgctaataacgcgaagtgtttcatttttttcaatgcctgacatgtgttccactccccagaatctagtttgtttatacttcttttactttcgcaaggtgatctcgaagtttactctaccagggattttccttccgaaaataacatcagcgcagataatctctcctcatctgtgttcaggttatgcccggaatcgcctgagaacatcaatggatctttcaccggagcatacgcccatgccgtaacttgtccaccatgcctgactaaaccaagaccatattcatggaggaccattcgttgtggactccgtcaggacttctcctttgcagataatcccttcagcgataagttcaacgtttccccatgacctatgtgttctttcacatcctggatggatatacggtcaaaataagcgctgagcgcctcttcgcctccgttatatatgttccccatcacatcctgcatattggaagataccacacacgatgaaccggactcccctgagcaccagttgggaccgagtgaaccaccagctaccagtctgtacaattctccaagcttgatctcttcactcggacggctaagcaagtacccaccatgagcaccttccttggtcgtcaggtaaccatgcttgcgcagaacactaagtaccttacggactctggccgggtgtgtacccacactctgggacaaatcttcactattggccatacactcatctctcatcgacagaaaaacaagacaatgcaccgctatggtaaattcgctgttcataacttactccttcccggcttacaacaccgatgaactccaactcaaggtaagtataactgtcattatatgaataacagttatgtttgtcaactttcacccagcatggagatcaaacgtgatttttcctgttataccaatacttacagctcatccacacaattaagctaggattaacatcccgtcttcattttaatccaaaaagaataaaaaagtgagccttccgctacgcgaagggctccaataagatagacatatgaaagggcttacgtgattattataatcggtaatctccaatttgaaaacgctttttttgtaaagtgcatcattattttaaatttttttatttgaataaattaaacaacaggtattgctaaaactaatcccattagttattatactaataccattagtttttaggagggtttaacgatgcgtattacccgagaatttgatgtcgttcaagttacgtttttcccaagactcttccctgtgaacgtatacctggttgaagaggaagatggtttaaccctgattgatgccggaataccggtcagtcttaaggggattttggcaactgcccagtcccttggaaagcccattaccaagatcattctgactcacgctcatagcgaccatattggtgcattggatcgtctcacagaggcactgcctcaagccgaggtcttcatctccagacgggatgcccggctattggcgggtgatacttcccttcttcccggtgagccacaaaccccggtacgcggcggcgtgcctaagcccaaagcggtgcgcacccagccaaaccacttgctggatgacggtgaccagattggttcactggtcgccgttgcctcaccaggacatacgccggggcatatgtccttcatggatacgcgcagccgcgttctcatcgctggcgacgcgtaccagctacaaggcggccttgccgtatccggccgcgtgcgcccgctcttcccgttccccgcgctggcgacgtggaaccgcgaagcggctctggccagcgcgaagtgcctggcggagctggaaccgtccgtgctggctgttggccacggacggatgctgcgccagcctgcggccgccatgcgcgcggcaaccgctgatgcacagcagcggtttgatcttgccggggggcaactatgagcccccggcaagggctggatcgcggcgctctgctcagcgccgccacccagcttgctgacagcgacggctttcaggcgctgacactcgccgcgttggcacagcggctggatgtgcgctcgccgtcgctctacaaccacatcagcggacttcccgggcttcgccaggaaatggcgctgatgtccgtgcaacagcttagccgcgcattaaccgcggctatcgctgaccacactggcgatgatgccattcaggccatcgctgcggcatacattggcttcgtccgcgagcaccccgggctctacgaagcctcatttcatgccccggaccgcgaggagccacagctcgccgcggccagcacagccacgctggagttgctgctgcacagcttgcagccctacccgctaaccgaagcggaagcattgcacgccgttcgtggtttgcgcagcctctgccatggatttgcctccattgaggcacagggcggcttcggcatggactttgatccggacgaaagtctgcgtctgaccgtatccgccttcctgcacggactccggcatcttcaccaggactagttaagccacgcattgcatcatgaaaaaggactgcagaggatttgcagtcctttttcattgccttgtactgggtacatcccatagatagattttgacagtaataatgttatagttgcgccaatgacttttaacacattaacatccaccttgaattcatctttcatcggcttgtgttctttataatctctttctttacaatttctcttaatacaaaagaaaaaggggcgcctcggttgcgtgatgccatgatcggtgccctctgactaaaatctaacgaaccgaggacactctataacggcaattagagcgaataacaacaactaacgaactccacacgtcctatttcgcagaaaactggctgcgggacaggaataacgagtatattccgtcatttaacgtgtctgtgattcgttacatttaccaacgtgccaaattaggacatataagatgtgctgagttcgttagaacgtgctatgtacggtgcttcagatcacgatgccatagcggcactcgtccactcatcatattggcgcataagtccagacacacattgtgttatggagctaaatacggagcgttcatgctccaaattgtattgatcaagcggatgcgggtacatgactagataaggatcttaccttgctcgtaatgcacatagtagtacatgttttattactattcatgtatagatcacgctacagttcagtacacacattaggacgattctagatacggagcttaccctgttcgtgatgcacactttagtacttgttttaatacgtgtcctaatacgaatcattttatagctcacactacatgtacggcgcagcgggataatttttgttttggatctagctacaactcccattgttcagggcgataagagtctgaaacagtctgaaacgtattcgatctccccagtccaatttcacctagcgattctgatccttacttgatttgccctgtctctcaaccacacttttgccactcacaacacgcacttctctattatgtacatctcccgttcctctcgaaaggtggaatggactttggcttccctttttccatcgaaacggttctcgataatctatctatggccattgctgccgtccatcctgcacttcattcaaaatatgcttcatcacgggcacatacaccttccagtagaacatgtccggaatatctttttgatctggtgtaagcttggaccgaacaacctcccaacctcggattcggcgccagaaagaataatgcttcatctctccaaatgaccctgccatgtaatacgaccgattatagtcgtcgtaccggaccagtgcagcaaattccgcaggaattcctgcatccaccagcttctgctcacctgtctccgtcagatccgtcttataccaggccagtatggagttcttctgttgcggcacaatgatatcgaaccagccactataatgtatatcctgggttatgccgctccaatcactgccttccggtgtaaatgcaatctgtatattgcctgtcttcacatccggacctttcgccagtaccatgacctgtccatccatatggatcagcagcatacccgctccgtgataagaccatttcttcttctcttgctgctcatagttcgtccgaatccaacggggtacttcttctatactctgcagattagataccgatttcccttgccatccactgctgtccacacccaagatggggtatagttgctctcttgtcatcttggaagccgtatttgccaatgcactgtattcggcaacaatcgttacccctttatatgcagcctcgcgaatcttctgcacatcatatatcgttaatccttcatagattccgccttgtttcccttcactcttctgtacagacagactactccgattcgccgtcagatagatcagatccgtatctgtcacctcatcaggcagcagttgcttcatccgtggaagcccgttctgaagatcatagccgtaataatcctcttcatacgagtagtattcccctgtgtgctgtacaatcttctgttgattcagaagccaaaccaaccccttgtgcccctgataggacaaatccggtctgctcttgtcaataatcatgatgttcaggggaaccggggcctgggattgccacataatccaggggacaaccaacaccaccgataccactgtaaaacaagccaacgtccacatcgtggctggcctgtaactttttttcatgaagcgtattcctccttgctctgttccaaggtattgtcaggatcgatcgttagattaccctaatccatgtctgctgtccttttcctctgccttccgcaatcccatagcctgcaacatgccatatatacgggatatgttattcagtggtctgaaccagaacgtctccgtacatgcatacaacagcagacgtgtcacctctcgggacgtatatgccttgcgtgaacaccatatttcgaacatcaccacacttgcggacaacaaggaaccatagagggtcagtagcagaactagaatgatgcataggttaatatccacccactgtagccctatgcctgcaatgaacagcacgatcgctcccagttccaacacaggccccaacaattcgatcaaataaaataagggatggataccatccccatccagccataggccggattgaagatcatgctccgctgagtccatagactgcttgcaagctgcatgtgccaacggatacgctgtctgcacagctgacgccatgtaccgggtacttctaccctgcagatcggatcgggaatatatataatacggccacgttcccgaatctgcttcatatgtttctgcaaccgcatcaccagttccatgtgagcgacctggtcatcgcgcttgtaacctccaacttccaacacccggttctttttgaatataccgaatacttcagacgtaaataaaagcacattaatattataacgaacaaggcccacaccgctaatcagaaaagcacgcacgtattcaatggtctgcattacaaacaacgtactgcccgtccttcttgcgccgttgtcggttaaatccgtttgattcgtatttctggaggccatgagatctactcgtccactacaagcaacgacctcttctcctgggagagcatccataacgggcttcataatcttcaccaatgcatcccgttccagaactgtcctgggtccaacagaggcgatataaggatattgcgagatattcagaccggcattcagggagtccattcgtcccccatacgccttgtcgatcacaaccagacgatgatgtaatctggattggtagacacatttaatctgagccgtctcctgaccgagtcccgaataatgaactttactccgaatgggcatcagatcataggtttcttttagacgccgcatggtctcatcctctgatccatcattaatgataataacctcataacgtgcatactgaatatccaacagacagctgattcgctgtacgatcgtatcctcgctattccgcaccggaacaagcagggataccgcaggagccagttcttcatccaacatctcatgatattgcagcgggtccagatccctctggcggatcaatgtgcgagcggcagcaacgaccagaacactacacatcacaatcgctaacaccagatagataaatatcccctcgtaacatgccaaaacaaaactccgcagcatctcaatccatcttctgtccatactgcatcctttccagcgtttcctccgctatctgccttgcatatttatccggatggtttacagccgtatcccggagctcttcaagtccctgctcgtaccgggcaagagagttcgccgcttcctgtcggatctgaaaagaaggatcacccatcattaccttcagtctaggaataaaagcatccgcatgaacagtacccataagctgggtcactgttagtctttcaaagcgttgcctctcctcaccagattcgttccataccagcaatagccccttcagcaaatcttcacgacctctgctcacttgagccaatgcctgatacgcatgggtacggagcaatgcatcctctccaagaatgagcttctccagtaggacaacagcaccctccgtctgatcatctcgaatacgaatggcatggacgatattagactggacctggtaaggtacatccttgaaatgatcctttagacgagtccaggatgaatcggtaagcaacagcagaatctgcagatactgtgaatcggaccatacatattgctcacgcatcaattccttcacgattctgaaataaccggttctggcatatatgcgcaatatgatgaagcgttcaagcggcgtacaggaagtaacccgcagcatatcctctaacctgggcagaagctctatcatatgaaactgttcaatatataacaacgtgttgacccgttcactccactttcccgtcttcacaaccgaccggtatgaacttccaaagacttgccaggataacagacgaattcgcagagtctcgtgctcttccggaccttgagcaagccgttgcaataacagctgctgcaaaacactctgttgatctccactcatgttcagtaagtcagctttcacttctccttggcccagatactgctgtaacactgaatcttcggaaagtaattcctgcatcagtaccgtcttaaccttttccctgtgcctactgctatatttcatccataagatgtaaccgtagataaccagcaaaaaagctagtacacttgcacatatgaggctgaccacatgtactaaccaatctgtattgcctacaagccaccctctatgatgtgagccgataagcttgatatacatccattgttgtccaatcattgcatgatttccccttaatcgaataaacagccttacaacgggcacaataatacaaaattttcaaatacaccctgtgaattcatatcgggtatatgatacactaagctttctatcggctttctgcgtttgtgatataataggaactgaaaattccggcaattcgtattgggttccggatctccggataacatattattccagaaagagggagttctacgtggctcaaatcagtccgtactacctgcaaatcggagcaaccgtgggcatgcttgtcatggcactgcttgccatcttcatccgcatgaaagccagtcacagaccggtgaccattcgtaaaatccttattcctccgctcggcatgagcacaggatttctcatgtttgttgtaccggcaacacatgttcctctactctgggcattctttgcgtttttggtgggctggttcctcttctcctatcccctcattcgcagtacacggtttgaacgagtaggtgaagaaatttttgccacacgttctcgcagctttgcttttatcttgcttggattgctggccgtacgcctgatcctgcatgaagtcattcagcgatatgtaagtattccgcaaacaggcggattgttcttcctgctggcttttggcatgattgtacgctggcgtgtatatatgtacaaacactacaaagaagtgctggtcgccgaacactagtcaccctacatagaccacgcacagatttacagataaaaaagacacgttctgctgcaccctcggtgtgcagaacgtgtcttttcgttttcaacctaattgtacatgtaaaccattcaatatctattcaggatctgcaaccttaaccagttgcttgcccagattatctcccgagaagagacccatgaatgcttccggcgtctgttcgaacccgtccacaatgttttcttcatactggatatgaccttccttgatccatttcgccaacttggcgcggccttccttgaaggatttcgtatagtcacccagcaggaaacctttcattaatgctgtatttgttaacagcaacgtctgtggtcgcatcccgatatccggcttctccagattataggacgagatctgaccgcataacggaatacgtgcattccgattgatgtggcgcaagactgcatccgagatgtcaccgccaacattgtcaaagtagacatctacgccgtccgggcaagcccgttcaatggccgctgacatatcctgctccttcttgtagttcaacaccacgtcgaagcccagcttttctttcaaataagcgcatttctcatcagagcctgcaataccaaccacgcgtgctcccacaattttaccaatctgacctgcaatcatgcctaccgctccggctgctcccgatacaacaaccgtttcgccgtccttcggtttgccgatgtcctccataccaaaataagccgtcagacccgtcaggcccagcgcacccaggtaagccgtgattggtgcttcttcggtatcaattagcgaaagatcagccgtattcactgcggcatattgttgccagccccacataccggatacgaggtcacctttgcgcagattcggttccgaagattccacaacctgtccaatggctccacccttaatcacttcatttaacgcgtacggtgcagcataggattttgtatctttcatgcggccccgcatgtatggatcaaccgacaaatataatgtacgtaccaggacttgcccagcttccggttcaggaagaggtgcatcaatgaatttgaaattctctctggatggggcaccttcgggacgagaagcaagtacgatctgtttatttaaagacaccaaaattacctccttgttgccaagtggacgcaaggttaacccttgtcagctgagatcacttaccactggctctgtgttatcacttcttaatagtttaaaccgaaacaggcggttcacaaacgtgggccgccttgaaatatgcaaatatcgtcacattgtagctgcttttggctattattgtgctgtcaaaatcactggaccatccgccgtaatcgcaatcgtatgttcatactgggcagacagacttccatccaaagtacgagcagtccatccatctgaatccagcttacttcggaacgtaccaatattcagcatcggttcgatcgtaataaccatgccttccttgagacgcggaccccgatgaggcggaccgtagtgagggacttgtggttcctcatgcatcttctcaccaatgccgtgtccgataaactcacgcacaaccgataggccttcaccttctgcatacacttgaatcgcattggagatatctccgatccggttgcccaccacggcaagttcaatgcctttgtacagagagtttttcgttacatccagcagatgttgtgcttccggagtcacttcacctacggcatatgaccaagccgaatccgccagccagccattcagattaacgaccatgtcgattgtaacgatatcgccgtctttcagtgcatattttcccggaaacccgtgacagatcacatcattaaccgacgcacatgtcgcatattggtacccgttatatcccttttgttccggcgtagcgccatttttcttcataaaagcttctgcaaactgatcgatctcctgtgtcgtaatgcctggacgaatcatctttgcaatttctctatggcatgcggcgagaatttctccggcttttttcatatattcaatctgttctttggtctttattgtaatcataacaactgctcctgtccgttaaaatcttatcctgtcctctattgtaacgctaaacgctcaaaataaaaaattccgcgcaatcagcaacattctattatacgccaagctcccgtccaatgaatacaattatccatgaaaaaatcgaaaccccttctgatctagccacgtatatgcttaaaacagttgaagtcgaaagggtgaaagctcatgttcaaaaagattatcggcaaacttatcgattccaaatcttcatctcaccgcaaacgtcatagctcctcggacaggcgctcatataaacgtcacagcagttcctcaggcaagcgttcctacaagcgctattcttcttcagatgtgaaataccgggacagccgcagtggctccgggtattacaaaagcagaaaatacagctccagctaagcggcttccactactgcttataaagagcaatgatcacaccagcttattggaccctacaataaatgaatatgtaataaaggggtgatcgctagccatacacacggctaacagaacacccctttattgtttctatataagtatgtatcaattttgctgattttgatgtcttaatgcttcaatatagcaaattcgcttatccagggagaacgaataatacactttaaatttatcaactaatatccggtacgtcccttgccaggatggttcctgagctggcatggattccgccatgacagccactttcatctcaattcttcgaactagttcaatcttatagagctttgtctcttcctgagtgaaacgaacacttctgatttgagcgagagcctgtcttgctgaaggtgtccactggatcaacatctataaattccctttttcaattgcgtcaattatatcatctgtagagtagaccctacccgaagaaatgtcttttttggcttgcataattaaagttttgagctccagatcactttctatttcttcctgaaccacgttttccagcggcttgattaaataatgcttaccttcaatatccacaatggtgtcttttttgctatgaaaccacgttttgaataattcggcatgatcgccttccagttttttaagcatatgatgaatcgcctccttcaacgtataattgttattcattatatcattcaacccactgttttgatacgtttttcatttttaacaaaaaggaaaaagacccctgcaagtatcatacgaagaggtcacggataacaaatataggtccgcctacagagctatttcattgtaatctcagcaacactttctcgatctctgcctgtaactctgtagccccaccctcataacttggccggagtccaaggagtcgctccagcatctggtgcaattccggcgtaagcttaagttcctcctgccaactggcgggttcacggcccttctctggctcataagccgaatacagcataaagagaagaaagtggccgatatcctgcaaatcatgatccggtgtagccggctcatcttcaggctcagggacttcacgcatacgttgcttcagctccggcaacaacggctcccccaagcgtctcgccaggccaaagtcaatcaaatgcactgtcccttcacgtaaaatgacattgggaatccgcacatctccatgaatatatccctgctcatgcacatgagccaccggagccagcagttgacctgccaattccagacattcccgctccgtatatcgaagaccttgctcaaatatgcaatcttccagcgtctgtccacggatatactcggtaacgatataacttcgtctcccggatgtgaacacatccaatagatcagggatcgccggatgatgcagacgtctcatcacgtccgcctctcgctccaataggtgcgcagagagcctgcccttgctaggcttggactccttcaacgccacttccctgccgttctggtcatctgtacacaggtatgtcagcccataactccccatacccagcaattcctgtattgtataacgctcagcaacggtcgtgccttccggccgaagacgatccgtccatagtccaagcaatctttgccaacttcgtcgcagctccacagatcctcccacgccagcttcctgatccactcagtctttatctatactgagcagttcgttgccagtcttcatgttgtatggagcttattatatcaggcccataatgcaaaatcacgatgggtaaatgcctgttgctcaagcttccttatgcttcttgggcaggaacccgaacaacatacgcagggatactcctttgggtttgcgttttcttccctggaaactgcgcagattggttacgagttcacgatcccgctcctcttccagcttctcgttcatccatagacgctgtttttccatctgttcctgaagagccatatgtttatcagccagatgctgaagggtcagctccagttcatcgacccgctgttgcagcagctgtacccgatcatcctgctgttgttctacagcaccataagtcacctcacttaccagttgccccagaccttcataggatctcagattacccattatttcaggttcttgagggagtacagatgacatgactgtcgctgcacattccgtctctgacagaccttcaattcccaccaccgggacatctacttctactacagctacaggtacttctggagccaatacggtcaccacagcatcagccaggggtagattatgctctctgagttcagtcatgaggcgttcaatgcactcgatgtcgtcggacttgaatagtctggatttgttggctgaccgttcgaaccggtatccctgttcttccagtgccgccgcatatttacgaagagtactggcacctatgcccaggctcttggccgtttccgtcgttgctcctgcttcttcaatcatcattaattccctcccggaatgaagtcttttgggaatcaatttcataatacctttagtgagttatgaaattgattcttggataaaaacattatggcttcagcgttcctttatggaaccgtcatcggatcggggcaacctgtctcatggaacaaatatgcttatcttttgcttgtccgtatgtattcgtcagcttctcggcagatccctttggcggttttgttctgtttctgcggattcctaagaagttttgtcaggtatatgatccgcacaaataacccccaatccgacaacgagcatgaatgctgtcatgtcgaatgacacaggtgcaaacgccgtcaaatcttaagattatgaattattcatgtcaattttgttaactcctttactccaatacgctcccgcgatagcggatatcattgctgcacagcttttccatgtgttatcttatgtaacgtagaagtgcattccagcataaaataaaggactatacttaacataggacgcattagtaacggataaatatcaatctaaatgggggctgaacggcagtgttaggcaaatcaggcaaagtagcggtgatcggggcgggtcttgtcggttcgagttgtgcgtattccatgattaatcaatcgatatgcagagaaattatgatggtggaccggacgtatgaccgtgctgtagcacaggcactggatttttcccattgtatggacttcacacataaccgcaccaaagtatatgcaggaacgtatgccgattgtggcaatatggatgtgattatcttaaccgccggggcgaatcccaagccaggacagacacggctggatattctggaggaagcggaatcgattgccaaagacatcgtggtcccgatcatgaacagtggatttaacgggatttttgtcgtcgctgccaatccggttgacatagtaacttatatggtatggaaattatccggcctcccgcgcgaacacgtcatcggtacaggcacgtccattgactcttcaaggctcaaaacactgctgtctgaagtcttctccatcgatccacgcagtgtgcatggttatgctctcggagagcacggagaatcacagttcgtggcctggtcgcatgtgaccatcggtggcaaaccgattatgcatatcatggatcagcacaaggagcgcttcaaacatctggatctggaggatattgcacgcaaaacaaaggatgccggctgggagatctttacccgtaaaggttctacccaattcggaatcggcaatgccctcgcgcatatcacccgttccatcctcaatgacgaacacaaaatcatcgccgtatcggccattctggacggagagtacgaccagcacaacgtttgcgtcggtgttcctgcaatcatcggtggcaatggcattcaggagattatcgaattgaatctggatgcaacggaacgtgagaaattcaacaattcctgtgaaatcctatcaggtaacatcaatcgtctgacactggtataagccattcgtgtacaactccacactgtatgcttcggcacaacttcaaaagcctgccaacgcaaacatgccaataatactccatgcgaggaggattattggcatgtttgcgtttattattttcattttcacagccagatgaatcaatttcataattgatttgagtagttgttcattttgttgcaagctgaggttcgtcccttggcccccattgctgtaacacccgcttcaactcactcagcataaccggtttgctaatgaagtcacgcatgcccatctccagacaagcttccttatcttcacgtttggcattacctgtaactgcgatgattggaggtatgcgatcctgtggaattaggcggtgtaacaggtctgtcgccttcagtccatccatcacaggcatatgaatatccatcaggacaatatcataagcattctgagagatggcatcaattgcctctacaccattggtacatacatctgcgtggtatccgagcttctccagatattctcgcaaaatcttccggttcaccggatgatcctccgccaccagaatacgcatggcgaccttgtcactttgacgtgtgcgatcatgatggaactgacttgctgtctgttctgctgaagcatctacactcgccgcaggaacagcaaaccggaaggttgagccctctccttctatactctcgacactgatactgcctcccatgatctccacgagtcgcttggagatgaccagtcccagtccggtaccaccatacttccggttaatcaccggatgtagttgagagaaggactgaaacaactgatccagcttgtcagcggggatgccaattcccgtatcttgtaccgcaaaatcaagaacactgtcttcaggctttctgcccttgataatatccacggcaacctcaatgcttccctgatctgtgaacttgagcgcattgccaaccaagttcaccagaatctgccggatacgtatggcgtcaccgaccatgaactcagggatgcttggattgagacgatatctgatctccagatgtttctcatctgcacgcggtttaaacagttcggcaacctgttccagcatcttgcgtaatgcaaatggttcataagccagtgccattttcccggattccagcttactgaagtccaaaatatcattaaggatgttcagcagagcatcgccgctgtctcgaataatctcggcatattcacgctgttcttccgataaatcggtaccgatcaacaattccgtcatccccacgatcccgttcatcggtgtccggatctcatggctaaccatcgacagaaattccgacttggcctgagctgccagctcagctgtctctttggcacgtacaatttcacgttcgccagtcacatcattaaatacaaccaccgcgccctgaatctgtccctgttcaataatcggcgtcacctgatactgcaccagaaaactgctgccatctttacgccagaacacatcttccttgattgaacgtatccgtccatccaacacggtcatgtggatcgggcattcttcttgtggcaaatgacttccgtctgcacgggtgtgatggatgatgggatgtgagtttttgccaatgaattctttcgcctcataaccgaacatcgaagctgctgctggattcataaacatggtgattccatccgcatccaaaccaaatattccttccgtaaccgtgttgagaatcagctcatgttgcttgctgagctcctgaatccgttccgtgtattccttgcgctcggtaatatcggacacgatcccatagacgcccaccatttccttatccacaataatgggcacattcgtaacagatacttcaattttccgaccacttgaattgacgactcgggtctcataatattgcggttcgccttgcttcaccatgtcaaaataatgtttgccatgttgcacttcgcatttatccagattggataaaaaagattggccaataagcttattgcgcggaatatccaacatttgcaccagtttgctgttcactgcgctgtatttaccttccagattcaatgaatacacagctgccgggttatgttcgaacaacgatctgtatcgctgacggctttcccgaagacgtctttccgcatccttatgttgggtgatatccctgctgatgcttacaatctggacactcttgccacgctctccagccacaggttttgccaatgtctccatccagatataatgtcccttcttgtgcaacacacgcatcttgcagccattgccgatcttggaaagatccatagggtccggataatctcccgaataacaataatccttgaaggacttacctatgacttcctccggcttataacccagtaaggtgtacacggaaggggaaacgtataacaactcgccatccatagcacaagttgtaatcagatcttgtgcatggtcagccagcacctgatatttctcctgtgcctccttaagctcacgttgcacttccaggatatcggtaacatctttggcaatgccatagattcctacaacttcttttccctccgttataggcacatacgttatctctgcctgtttcagggaaccatctttatgataaaaagtaatgggattactgactgaacgtccagccagtacctctttaatgtattgtttacgtgaattttcactgtccggaggacagatctccctctgattcatacgaatcaagtcatccagtgtatacccagatatccgctctaccgagggattagcatcaatatagtttccaaggatgtccattacataaatggcatccggatggttaaaaaacagtgattggtaagaacttccctcagaaataatgcgcttcagggttcccgttttattaatatccaaggcttacccctcttttctcagccaatatcttcatctaacagcagggattaattatcccttacaaaaatgggcctaccctcgaataaccatgtaagcctgcctagaaacagctttttttattttaccagattctcgtctcattttgcttacaatctatgattcaattcacatgatgtgtgaggtaatacttggaattttgatttacttaggaggcgccttcaaaggcagacaatttatacaaggatcaatgtaagcctctaacaagcttgaagttcaattccaagtcagctgattctggcggatggctaaacgattttctaaagaactcaggacatcttatttggcgtccatgtgccctttgtaaattttaaggaacatcagacacgttaatctccataatctcctgttatatacgctgcaaacggttgtttcattggatataacatgtctcaggttccttagattgctgagatcacttcaaatccttgaatagtactcctcaggttcgttagggagttgagaggatgaacccgacccccacctgaaacaaattttctcaaagaaagagagataagccgctcttatgatgcctcgatataaaattaacgatacattttgtatcgaaaaggctataatctttaaaaaaagtttttttgattacggagaggacggatgaatcatgctgcccaacagagttaaaattgtttacggtaaactaagaggtttggccatctttggtaaaatccagccctcaatgggcctgctgccacgaatcaggggtaaggtttatctgaataaattgggtgatttgcaggtaggaaaacgacttaacatcataggcaaaccttggggaacccagttaacggtggtcaaaggcgcgcgattaacgattggcgatgacgtcatgattaatgcaggtgtggggattgccgctaacgttgaagtgaccatcggcaataatgtcatgattggtcctcgaacaagcatattcgacagtgcctaccaccggattgactcgctggatgacgggagccagactgccaagcggattgtgattcaggataatgcctggattggtacaggcgcgcttattttgcccggagtgaccattggcagaaatgcagttgtggcagcaggaagcacggtaaccaaagatgtacccgaaaatacacttgtagccggggcaccagccaaaatcattcgggagttgaccattcatgatgggtgggtcagacattagaaaaaatcctcctgaagcatacatacaatagagcttgcatgttttgcttaaagaggattttgacttacgataaccaagggtgcaacggattattcagatttcttttttcgcaaaatacatcatgccgattccaatgaaaataacagcactgcctccaacaaccgccagcattgtgaccagtggaacattgtaggctccgaaacctgtgccgtccacgggtgtcatcagaatcatcggttgtgcccatggataatacggcccatatgtcgccgagtttacaatgagaatattcggtatggtcagtgcaaaattcagtgcgagcggtgcggcaaagctgctccacaccaatgaaacgaacatctgcagggcagcaaggggtacactggccagcaagccaagcagcagttttcctaccaagaatccccaaggtactggcattgtaatgccgtgaatcatgcctgccagcagaatggacatcagcaacaatgcttgcgtacccgccagaagcatgagtacaatcgtcagtttacctgcatatacacctgaacgtgtgagcggcaaaaccagcatctgcttccaccctccacctgcatgttcaaaacggcagacaaaggacgtaaacacgccagtcagcatcggtaacaataacaatccgtgcaggaaaaccatcgtggtcatcaatacctgccaatttcccgatggcgtggacaacagtccgatgagcagcgcaatgagtggactcagcagaatcaggagccatatgggcgatttacccattttcaatcgttcagcggacaaaattcggaagtacgttgtcgcaaagctcatatcaggccacatccttccggctaaaatgcatcatacccagcaacaggatcaataaccctagacctgcccccatgcctgcatacaggtatggattaggcccattccaggccatctgtgcccatgcgagcggaaagctcggtgagatactgagtgagaacatacccgttatcgcgagaacgatgcccagggtgacgggaagcgcctgatttttgttaaccatcgtgagccacaactccagtgacaacaccggaagtgcaccagccaaaggcaatagccccagcttgattgcatgtgtccaaggtatttcgctggcatggaatccgaggatcagacccagacctacaatgcctgcggttaagagcaggcaggagatcaccagtagcacacaagcaagcaggaacttggctaaatacacggctgatctgggaatgggcatcgcgagcaactgtttccaagatccctgttcatgctcaacattagcgatcatggagctgagaatggttgctcccagcatcagagacaagggcacaaagacaaccacattgccgagcaatccgccccacaggttatctgcatattgctctttcagatagtctagccgtaagccaaaattaagcgcctgcattgctgtcaatccaagaggggccagaaagacaagaaaccagatccctttcccccgaatcttgagccagtctgacgataatgctcgcccggtcatatggaagccccctcgccaatgacccgcatgaacagatcttccagcgactgacgctgttcctctacacgatacacatcatgatcctgctcaattaatcggcgtacaagcagtgccactgaactgttatccatataagggaacgttaatgcagcaccttgttgctgaccaaattgtccctgttctctcgccagcttcatagcctcttccggctcggaaaccgttaaccggatagagctacccgtctgactatgcagacttgcgatggtatcctgaagcaccatcttgccttcacggataataccaacacgacttgccatctgttcgacttcactcagcaagtggctggaaaccagaacggtaatgccatgttccagcggcatgcgtttgatcagttcccgaatctcctgaataccggcaggatcaagcccattcgttggttcgtccagaatcagcagctctggttcacccagcaaagcactagcaatacccagacgttgcttcatcccaagggaataccccttcactgaacgtttggcatccttggtcagatctacaatggacagcacttcagcaattcttgatttgggtacattgatgatgcggcgcaaagtttccagattctctactgcgttcagatgtccgtaataggacggatattcgaccaaggaacccacacggcgcaaaatatccatgcgatccttgcggatgtccttgtcgaagacacggatcacgcctttggttggtttaatcaagccgagaagcatgcgaatcgttgttgttttgccggcaccgttgggaccgaggaagccgtagatatctccctttttaatatgcagatcaagttcacggaccgctgcacggtcccggtatgttttccataaattcgccgtttgaataatattttcactcactgtatgatcacctcggaactatcgtaaccttccaaggttaaagccaaagtagtctctagtttaagtttagtttaaaaaagctaattcagcggtttgttgtttccctgtttcccttaccactgtagatatatgtctggacacccgtatcggaactgtctacccgcttgcgcaaacccatctcacgaatcaacaggtctacaatggataagcctagacctgtgccttttgtgtcggaattcggttgcattcccggaccccgatcctgaataacgatggccgtctcaccctgaatctcctgagtagatataccaatatatttcccgttggcggcatgacggatcacgttttggaacaaattatcaagaatacggcgcatgccctgttcatccatatgccaaatcaacggttcctctggcaggtcaatatcaatatcgaattgctctttctcccagaccgggtaccaggcggccgccgtttccctgacgatccgcagtatatctttctcttccagcttcagtgtatatttcccacttgtgagcaaattgtaggataacatgttgtcaatgagcccgccgaggtcctccatctttgcttccatgcgatgtaatgaacggtcaccttgctcgctcagctcttccttgtgcaaagcatgcatatgtccacgaatcaccgttagcggggtgcgcagatcatgggaaagccctgcaatgagacgtttgcgcaattgttcttcttcgcgttcacggtggcggctgtcggacagttgatgcaccatctgattgaaggattcttccagttgaccaatctcgtctgtccggcggatatctaccggaagcgggagaccttccttgcctgtggtcatcatggccgtctgcaaccgaataagtcgtttgcgaatgcgtgcgaagaagagaatcgacataatgataaagatcagaaagatgagggtcattacgataccaagatacaagagttccatcggccagttactctgattcatttgcagaagtgaccgtggcacttcaatgatcatgaatccctgtcctttgtcctgctcagctccgccaatatatgcaactacggtcagtggatcgcgaaaagaagcttctttcatgaattgcaccgtattgtttacattccataaggctggaatatgagtctctgtcgtttgcccggaatccagtgaccatctcaatgtcgtgtctgtcctcccatccggcgacgtggatttcagaagcgttacatcttcacccccaagaataaagagggtctcaccgctcacactcacacgatacatggaagatttgggatacgagccatgtaattgctccaaccgggccttaatctcttcatccgaagcaccatccaggttcttcgcttcatgtgaccagaggttactgatcttagtaacatcaccgtaaggcgcggcgcggttcatattcgtgtccgtgttattcactacaacaatatatataacggatatgatcggaagtacaacgggcacaaataatacagccgccaagatcaggaggatgtatctggacatcaaggaccgcccaaagcgaagcttgcgccgcccggattgcttttgctccttgcttcgttctcccttcatgatcttccgttctctgaacaaccgaatcatggcttcttcacacgatatcccacaccgcggaccgtctgaataactacaggattggccggatcaagctccagcttttcgcgtagatgtcgaatatgtaccattaaagttttgtccccatccagatagggctcgttccagacggcttcatagatctgctctttggttcgaatcatgcccatatgtcgtagcaggtaggcgaagatgtggaactgttttcccgataaaataatctcatctcccgtctcctcattgacgatccggttgtccttctcatagatggagagatgatccagcttcagggctgtatccgatgagaccgctgttcctgccttacgcagttgtacttcaatccgggcagccagttcatcggggtgaaatggtttggtcacatagtcatcggcaaaatcaagaccgtgcaacttatcgtcaatggacgttctggccgagagcatgacaatgggcacggcgggatgttcttttttcagtcgctggcccaccgtaaatccatccagcccaggcagcatgacatccagaataatgagtgaacaaccgacagcagcctccgctgcaccttcaccactgccgagccataccacctcataaccgcgctcctccagatcggctctgacccaagtcgcaatttccgtatcatcttcaatatataacagtttggttttcatccgaatattcgtttcctttctgcccccaatgggttaatgatatatctgagcatcatcatgataaaagctgtctatatcatatggattcatgtcttgttgagcaaatgttgaagtcctttacgttaccatacatgctaattatagcttatccattaacgtggggaatgtcatattaatcaagtctaccaagtacatatcagtgctacacctgacgggaggaaatcattatgttgctggaagctatttatcatcaaccgaaacgaaactgggcctatgcctatgaccaagatacaatccatctgcgcctgcgtgccaaaaagaatgatctgaccgaggtacatgccctgaccggggataaatatgcgtgggatgcaaccaaagcgctggttcccttaacaaagttcacctctgactccatgttcgattacttcgagggtgaggtgaaacctccctaccaccgactgaaatactcttttctgctcaaaaacggagacgaacagatctggatgaccgagacggacttccaggaaaaagaaccagacgatccgggtcgtatgttccagttcccttatattcatgctggagctgtattcacaccccctgcatgggttaaggatgcattgttctatcagattttccctgaacgattcgccaacggcaacccggatattagtccggaaaaggtagagccgtggggtggtgagccgacacctttcaatttcttcggcggtgaccttcagggcgtaatcgaccatctggattacatcagcgatcttggcattaatgcgatctacttcacccccatctttgaagccaccaccaatcacaaatacgataccgaagactacctgcgggtagaccggcactttggtgacgcagataccgtgaaacgactggtcgagctgtgccatgcacgcggaattcgcgtacttctggatgctgtgttcaaccattccgggaagacatttgcgccgtttgtagatttacagaagaacggagaacaatccaaatataaggactggttccatgtacatgaatacccgctggacgtgaaggacggcattcctacgtatgagaccttcgggttcgaagcgcatatgccaaagctgaatacggagaatgccgaggttaaggcctatctgctggaggttgccgagtactggatcaaggaagtgggtgcagacggatggcggctggatgtggcagacgaagtggacgatgcattctggcgtgatttccgccgtgtagtcaaagcggctaatccggatgcctatattctgggcgaagtatggaacgagtcttcctcctggctgcaaggcgaccagttcgatgcgtccatgaactatccgtttaccgatgccgtgaatgctttctttgtgaaaaatacgatgcacgccgaacagttcgcaaactccatcgggcgacagttatcccgttatccgcttcaggccagcgaagtggcgtttaacttgctggacagccacgataccccgcggctgctcacgctgtgtgaaggtgaccagcgcaagatgaagctggctgcgttattccagttcagttatatgggtgctccgtgcatctattacggagacgagattggcatggacggcgaacatgatccgggctgccgtaaatgcatggaatgggatgaagcaaagcaggaccgagagctgtttaacttttatcagaaactgatctccctgcgtcatgctcatcctgccctgcgtgcagaaggcaccgttcgtttcttgcaggctcgtcccgatggcagccaactggtatttgagcggcaaaatgaggaggaacgtattctggttctgttcaaccgatcagaagagacggctattgtcgagctggaggccggtgacgaggaatggaccgagttattcggcggaaaccatcgtaccgccaaggaagatggcgtactcgccattgaattgcccgcgtatggatatgccgtactgagtactagtctcatataaacaccaagctatacttgctcatatgcaagactggagtctgttcagttcatcggcatatcaaacgaaataggcgctcccagatctgttcctgatctgtggagcacctatttgattttgacgttattcattatggccatggattactctggccgaaccagctgttccttgagcaactggatggtggcctcatattgtacaagccccacttgcagacacagacgctgtgcaggcgaaatacgttcgccgaattcctccatctggcgctgaagttcagcgtataacatttcctttcgcttcaactggctggatatccaacccgttacggtatcttcatccgccaactctccgaaatacaaccgcatcagaaaatcagaacgaaatacctcagcttccaaaggactcattaaataggcgtgaaattgcgctgctccttcaggggtcaatgaatacacgttcttatcaggtttcccttcctgcttcaccgattccttagtcagcaatcctgacttttccatcttcgcaagtgtaggatatatggtgccgaaactggcatcaaagaaaaatgaaaaatattgttcaaagtactgcttgatctcgtatccggaacttggctgattgtgcagtattccgaggatgacatgctgcgtgttcatcggtgtaccgctcctttccattccccttaacgtatcacaatcagtaccccttgttcaatgatcatatgacgaaacggttgctttcagagcaacaggcacagcagcaggctggtcctccctacgagcttcagaacgtaccgggccggagcgtctgatccagatgcaaagcgcacccagagtcagtgttacaccaccgattacggcgagcaacatcgcatcccggccaattccgtttcctccgagcacaaggttcatcatcccttctacggcataagtcgctggcagataatgaccgatcacttggtagaagtcaggcattacatctcgcggaatcgttgatcccgaggacagcatcagcaaaggcaacagcgcactgtttaaccaagccccagcattgccaagcaacaacaagctcaactgagccatgagtataaaagatatggtgaccagcaactggaacagccataacatgaaccaaccggctgctgacgatacccccataatgtgcatcatccctgatccaacgagcgagacgataaatgccgcaccaacattaacgatgttgcgggcccagaagcgctcccatttccctgccctgccactcagttctccagacactttttgcagattcatgccaagcaacattgctccggtaaacgtagcggttacaatcaacatcggtaccatggagaaagcaaaattatcaacaggattcagtcgctccacctctgcctccacgcgtgaagataaccctaccgcaagcgcatcggattgatcagcagtcataccggactgattcagcactccgcgaatgccattctcttgtacttcacggttcaacgtcgctgtaacttgtgcggctacgttctgcatcacacttttcacggtagccacgtttgattcgttcatcacatacttcactgtcatcggttttgacaagtcttctgcctgttgcatgaaacctgatggaatctcaataatcatgtacacattccgatccgttaacatctgtcgtgcttcttgcatcgattcagatggtttgatctcgaaattcagacctgccgccaaagacttagccactggttcagccgctaccccatcttcattcacgatggtgacagccaattgagtcattctttcgttaacctggtcgtatccgctaagccagatgatgttaaaaaaaacctgaaacagcacagccgtaattaaacctacaatggtggctccgtttttcaaaaacagtagactcgtctggaaaatacctttcattctatccatctcctttagttttgtttcgctcttttatatatcgtattgatatatgacaattgttaatatatcaatacgatatataaatcgtcaatgtttttatttttcttgttggtaaaagacaaaaaaaagccgatacatctcttcaccaggaagatttgtaccggcttttcatatcaatcctattacgccttaggttctgcatcattttcagtagacgactccatctcaggctctgcacgctttgccttcggtttagccagcttttgcatcattttgcggccggttggcgtctgggccagtccaccttgggctgtctcccgatggcggctcggcattgcactgcctacttccagcatgacatcgatgacttcgtctgacggaatggcactacgcactccggccagggccatgtcagccgcagccagcgccgtaactgcacccagtccattacggacgatgcacgggatttcaacaaggcctgcgaccggatcgcagataaggcccagtgtattctttaacgccaaaccaacggcatgaacaacctgttctggtgtacctccacgcagttcaaccatggcacccgcagccatgccaatagcggaacccacttccgcctgacagccaccttcggcaccggagataaatgaattgttggcaataacataaccaatcgcccccgcacagaacaacccgttcaccaaatgttcgtccgtccagccaaaccgctcctgtgagctaataaacacacccgggataatgccgcaggaaccggctgttggtgttgccacgatccggcccatggaggcattcacttcagatacacacagggcatacgccatggcaagtgcggaagcatctcccgagcaagtctcacccttgcgaatgtactcagccatttttttgccgtctccacctgttaatccactgcgtgatgtagtatcttccgttaaccctttgcgtaccgcttccttcatcacctgataatattcagacatctgcttcacaacatccgcttccggtgtattggtctcctgaacctgctcctcgatcatcagctgagcaatggtttttgattctgctgtacagatcgtattcagttcgtgcaaatgtttaaaccgcatccgaatcaactcctctcttcaaatcaatgacacgaatgtccaatacatggtccagctcccttagacgcttgagcatatcaggattaggcacaccatccatttccatcgcggtaagcgcttcgccatcacgggctttccggtccacctgcatatacccgatgttaaccccggatgaactgatcgtggacgttaccgatgcaagcacccctgctttgtccgcatgtcgcagaacgagtgttggaaactcaccactaatctgaacacgaaaatcattcatcgaatgcacggatacgcttccaccaccaatggatgcaccgattaaggagcaggcacgttctccatgccacaactcaattttgaccgtatttggatgaggagcaggcaggccacttgtataaaactcaacctccatgcccgcttcctctgcgtattgctctgcatccgggatacgcggatcgtctgtgacataatccagcagaccgccgatcagtgccagatctgttccgtgcccctgatacgtatctgcaaatgaaccgtacagcgtcagccgggcacgatctggcgtacatcctagccactgtcgagcaattctccctaaccttgccgctccagctgtatgtgaacttgaaggccccgtcatcgatggaccaataattgagaaaacatctttaaatcgcacttgtaaccctccattattaatcatgattcatatttgtaaaatgtattcgtcatttcgatccaggagtttcatccacaatatcccttatttagatatgatgacatcaaaaaaggacagaagaaggccttaggccctctctctgtcctcgatacctgagagtttcacgatcagcagtgtctcacgacaagggtgcactgcctgcgattacagacaagttcaccgggctgactgatcatataccccttgggtggcgcagttcgcgcactctccagagttgcgtccaacgatggtacatttacctgagagattaaccactgcgccgggtgcgcagcagcttgctccttcggtgcctgaacactagccatattgctcggctaacccaggtctctcccgctcgttatcatccgctgtattatcttaattcgattcgaattggtatatttctaaatttttgatcaagtatacccatagagtaatgtacaacatcatatatgtcaacaaaagtaacgtgtaattatcataagttcgatgtctattttaactgaaacgaatagcattcagatttctcacttccgctgaggcactcgtgacgttgctagttgtcgtaaattggatacttatcgtgtatgcattagtcgttgtagtcggggatgtatccacgtaagtgttggaggaaagaaacctcaacgttcccgaagcattaccggttcgtgagagttgcaattgattaattaaaactccgttacgtctcagattaatgttatacgcaatactccagttagaccctacaactattgctacttgtgtactattatcgattttcacgcgttgacctgccactacaggtacattaagtgtctgaatcgtcgtttcggctactaatgaaagacccaacgccgtggtctggctatcagcaaacaaggaagaatccgcaggggcagaagctgctgtcgatccagtagctcctgttgcgccagtgaatccggtcgctcccgttgctcccgttacaccagccgtaccggttgttcccgtcacgcctgtcgcacctgtagccccagtgaatccggtcgctcccgttgctcccgttacaccagccgtaccggttgttcccgtcacgcctgtcgcacctgtagccccagtgactccggtcgctcccgttgctcccgttactccggccgtcccggttgtccctgttacgccggtcgcaccagttgctccagtgactccggtcgttcccgttgctcccgttactccggccgtcccggttgttccggtcacgcctgtcgcacctgtagccccagtgactccggtcgctcccgttgctcccgttactccggccgtcccggttgttccagtgactcccgtcgttcccgttacgcctgtagcacctgtaaccccggtacctccagttgcccctgttacgcctgtaacaccagtgactccggtcgtacccgtctgtcctgtcacccccgtatctccagtaaatccggtcgcacccgttacgcctgtcgcgcctgtaacaccagtacctcctgttgttcctgtcaatccggttgtacctgtaacaccggtgacccctgtcgttcccgtcagtcctgtcactcccgtatctccagtaactccagtcgctcccgatactcctgttgcacctgtgacacctgtgacaccagtgactccagtcgttcctgttacgcctgtcgcacctgtaaccccagtacctccggtcgtccccgttacgcctgtcgcacctgtaaccccagtacctccggtcgtccctgttacgcctgtcgcacctgtaaccccagtacctccggtcgtccccgttacgcctgtcgcacctgtaacaccagtgactcccgtcgttcctgtcatgcctgttgcacctgtaaccccagtatctccagtcgttccggttacacctgtcgcacctgtaacaccagtgactcccgtcgtccccgtctgtcctgtcgctcccgtatctccagtgactccggtcgtccccgtctgtcctgtcgcacctgttataccagtgactcctgttgctcccgtcaatccggttgcacctgtaacaccagtatctccagtcgcccctgttacgcctgttgcacctgtaaccccggtacctccagtcgtgcctgtaacaccagtgactcccgtcgtccccgtctgtcctgtcgctcccgtatctccagtaactccagtcgtccctgtaacgcctgttgcacctgtaactccggtcgcacccgttacgcctgtcgcgcctgtaacaccagtacctcctgttgttcctgttacgcctgttgcacctgtaacaccagtgactccggtcgttcccgtcagtcctgtcactcccgtatctccagtaactccggtcgttcctgttactccggttgcacctgtaacaccagtgactccggtcacccctgttacacctgtcgcacctgtcgcacctgttgcacctgtatttccagtaactccggtcgtccctgtcgcacctgtaacaccagtggctcctgtcgttcctgttactcccgttgcacctgtaacaccagtgactccggtcacccctgttactcccgttgcacctgtaacaccagtgactccggtcgttcccgtcagtcctgtcgctcccgtatctccagtacctccagtcgtccctgttacgcctgttgcacctgtatctccggtcgcccctgttacacctgtcgcacctgttgcacctgtatctccagtgacccctgtcgttcccgtcagtcctgtcactcccgttgcacctgtaacaccagtgactccggtcgttcccgtcagtcctatcgctcccgtatctccagtacctccagtcgcccctgttacccccgttgcgcctgttactccagtatctccagtcgttcccggtacacctgtcgtaccagttgccccagtcactccagttattcccgttgcacctgtagatccagtatctccggtcgttcctgtcacgcctgttgtacctgtaacaccggtggctccagttacacctgaaataccaccgctgtatgcccccagtaattcctcagatacgagacgatgagcggtgaccagttctccattctggtttttcccccagaccgaaatctgcacatcctccacagtagcatcatccgttgtaaaaacaaattcaaacccgtccaaatccgcataaaaatccttggttattacctgattaggcaaaacattgaacaactcttcgatatataatgtacgtacgcctaccaaataatatccttgaacaagaactgtataaatactaattgtattcctattatccagccttatcgtaattctctgggtaggacgcccatttcccgcaacaacattattttcaatggggcctgttgataaaacagccatacatggatgcctcctctgccagccttcgccgggtcatgatcatcctttatgtatatgtaacaaacaagtagatgtcgtcacaactcatagaaaatacgctcattttgcacatagggtcggcaatacttgctgcacagctttggcatgcgatctttcatccattcgtgcctcgactcattcgccatctgaaaggcataataacccagtgtaaagatcaacataaacccttccattaatcggatatcacgatccgtcagtggtgcgatctgttgggtataaccggataagaatatgtcacgttcctcccgattgaacataagtgctgcccctccggcatcaaaaagataataaccataaccgtgtagacaaaaatcaatcatggaaattccctgctccgttatcagcaaattattgcgagtaatatccccatgaatgatcccccatgtccctgcgtgttgcgggtatgtttctaactgctcattaatgttctcaaacgtctcacgaagcagatcgaagtcttccgttgtaaaaatccccagtcggacgccttcttctagctgcccgagcatgaccaagttctcatggctattgccatatgccggccgcacctttgttcgatcggtctgattctgctcacgcccatattgatgaagcatctgcagttgtgccccaagatcatagatctcctctgttgtcagccgttctccctgctggatgtccctgccctcaatccactccagtactgtacagcagatttctttacccacttcacttttccataccgtgacccattcacccgatacattccgtaccggatgttgcacgcgcaatgctgtcgttgcatttaactcatgaagcaggttcatctctgcctccagcgcatgaagcgtatgctgaatgcctgtcatacttgcataggcggcttgatggatacgtagcagatacttctgcccgcttgcttcatcaacgacatgatatgtcagattctcattatgacgaatatatgaaacgacaggtttctcaatagtgtagttctgtataatctgagctgccatatggtcgtaagacatctgatccgtagtgattatcaacatctccttcgaagtcatgtaaacgttctcttcacactaaatatcgtagcataatgtttatcccgcatacagaaaatcccactaaaatataaattaaaaaagcacaacccccgaacaaccgtccaggcattgtgctttcttttgtctctattatttctctatctctctgtctgttgctctatgtgacactccatgatccaattaaccaaaacgacccataatgtattcttgcgtcagacgattgtccgggttcgtgaaaatatgctctgtatccccgtgctcaatcatgcttcccagatagaaataagctgtgtaatccgagatgcgtgccgcctgctgcatgttatgggtaacaataacaatccgcagctccttcttgagctcggtaatcaactcttcaactttacccgtagataccgggtcaagtgcagatgccggctcatcgagcagcagaatctgtggttcaacagacaaagcgcgagcgatacacaggcgctgctgttgtccgccagagagagacagagctgattcatgcagtctgtcttttacttcgtcccagagcgcagcacgacgcaagcttttttccacaatttcatccagtgccttcttactcttcgtaccgcggtagcgggggccaaacgcgatattgttgtagatggacttatgaaaaggatttggcttctgccacaccatgccaatcttctggcgaagcttgattacatcggttccaggctcattcaggtcgttaccgtccatccagatatgtccctctgtacgggaaccggcaatctcgtcgttcattcggttcagcgaccggaggaacgtggatttaccgcaaccagacggtccaataagagccgttacgcttgcttcaggaaacgtcaggctaatctgcttgaccgcctggaaatgtccataatatatgcttaactgttccgtaccaaaaggtatggccatgttggttcctccttatttcgaagctgtcatgcggcggaatacaacccgaccgatccagcgtgcacttagattgaacgccagcacgagaatgacaagcacggcggatgcccctgctgccacttctttggaatctggcccaataccttcactatttactttccagatatggacagcaagtgtctctgccggacggaaaggattaagcggtgatcttggactcgtcggattccaatctgtaaagtccaaaggtggactactcatacctgcggtgaacatcagcgcggctgcttcaccgaagatccggcccgatgccaggatcgtacccgtaatcaagctcggtaatgctacaggcaacagaatggaagtaatgattttccacttggacagcccaagcgccagacctgcttccttctgctccttcggaacggcacggaaggcctgctccgtagtccgcaccatcagtggcaagttaaagatcgccagagccaaggcacccgagatcagggagaaaccaagaccaaattgatttactagcagcaagagaccaaacaaaccgataacgatggatgggaatgatgacaatacttcaacgaccagacgaatgaagctggtaatcttgcctggtttggcgtattccgccatgtaaatcccgccgccccatccgagtggaatggtaacaagcaaggtcagaacaagcaagaatacggagttgaagagctgtggaccaatcccgccgccacccttaagcaactgtggtgcacttgtaaggaagttccagctaatatgtccaatgcctctatacatgatgaagccaagcagaccgagcaatagaataacaatgaacagggctagtacaacgataacggatgttgcaattttatctaccgtctttgccttcattttcatacccggtttctcctttcaagcaggcgaaccagaatgacgaagacaaatgtcatcaccaacaggacaagcgccatactccacagtgcattgttatgaacagaacccatcgtggtgttacccatgctgagtgtaattacacttgttaatgttgaagctgattcgagcaaggatgttggaacatgcggtgcattaccgataaccatctgcacagcaagtgcttcaccaaaagcacgggccatacccaaaacgacacctgtcaacaaagctggcaaagtcgttgggataatgacacggtagatggtttgccagcgagtggcacccagtgcgtaggaggattcacgcaatccttttggcaatgcggacaatgcatctgccataatacttgtcaccgtaggaagaatcattaccgcgagaacaagacatccggctgcaatcccgacgcctgttccgccaaagatactgcgcaacaaaggtacgatgacactcagaccgataaatccgtatacaacggatggaattccggacaagagctcaatcgcaggctgcaagatctttttgcctttacccggaacaatctctgtcatgaagagcgctgcacacaggccaagcggacttgcgatcaatgctgcaagcaaggttgtaatgaaagaacctgtgatgaacggtaatgccccgtagaacgcaggttctccggtcggattccacgtttttccaccaaggaattcgctgatgcttattccgttttggaaaaatgtggatagccccttagacgctacaaaataaacaatggaaaacatgacaacgatcaggaaaacgacacaaatcgacgtatagatccgtcccgtccactcttcccaataatgtttctcttttaagggccggcgcggtttcaacttgttattcattaccgttcccccttcggtctgttccataacaaccatccttctatagtagaattaatgcaaaatatgggattattttagagcaaaccgcgtaaagaggcgggacctaagtccgcctctttcgctgtatgcgcaagttcaaagattactcaaccacattacctgctgcatcgcgttttactttcatacctgacattggaatgtatcccagttctgtcacgtcattttgttgaatttcgtcactcaagatgtagtccaggaatgcttgtgttgctgcatctggcttaccttttgtgtacatgtgctcgtaagcccacactggataagttcctgcttctacgttctcaactgttgcttctacaccttcatatttcaacacttgcaagctgtcatccaagtaagacaaggcgaggtaaccaatagcacctggcgtttcagataccaatttttttacgttaccagaagaatcttcttgaatcgaaccttggatatcacccatttttgcacccaatgcatacttctcaaaagttgcacgagtaccggaactgctcggacggtttacaataacgattgctttatccgcgccgccaacgtctttccagtttgttactttaccggagaagatgtcgaccagttgttgcttcgtcaaatcttctacacctgcatctttgttgctaactggcgccatagctactactgctacttgatggtcaaccagttcttttactttggcttcgtcctccagtttctcttctgcaaatacatcagagttaccgattgtagcttgtccgtcagatacttgtgtcaaaccagtaccactaccgccaccttgaacttgaaccgttacgttcttatattcatcaactgccataaatttctgtccagcttgttctaccagaggtagcaatgctgtcgatccgactgccagaatgttaccgctaagctcagtagcagcttctcctgatccattgcttgcggcaccctctgtaccagcgtcatttttcgatccgcatgctgcgagaaccagtacgaacgttaaggtcatcaaaataaacggcaactttttaaacatgttttgttttcctcccccaatgtagtgatggcgttttgtgaatttgtttgttcaccatcaactctttactcattgtagtttcggtatgtcatcttaaaatcagtgttttgtaaacgcaatgttaaaaatatcggctgtatattgaaaatcatctgagacaagttgcgctgaagtggccgcttcgggaacggacgttgtttcaatcgctgttatccccggatttatatgatttacttttttcaaggaatacatccggggataaaggcgaacgcttcgcttttccacaatcgttccgttcccttcgctgtgtcagcgctcgttggatctcaggcatttcaatctcctgcctgggaagtaggcaaaaaggccagccctataaaaggctggccttctgtaaatacttaatgtagatattgaatcaatccgttatatagaacaaacaaaaactgcctcacagccagtgcatggcaccaggtggttagagaatttatgcagatttcatagttgttaaggcttttttatctgacgggtcgcttgaattactttttggttgatatacaggtttctttaacaatccaatcatacaagctgtaatgatggaaccaactaaaatacagacaatatacagtaatggattacttgccgcaatgggaataacaaagattccaccgtgaggagcttgtaacgaaatacctagagccatgctcattcctccaccaatcgctgcacctacaatattggatggaataactcgcaagggatcatttgcggcaaacggaatcgcggcttctgtaataaacgacgcacccataatataagcggctttgcctgcattacgttcttcgattgaaaatttattcttaaataatgttgtagctaatgcaatacccagtggcggaaccatacctccaaccatcagagcagcagaaggttcaaagatttgattggcgaacatcgccagtccaaatgcagatgctgttttgttaatcggccctcccatatcagatgccatcattcctgccagaagtgctcctaataaaatagcattagaacctgttaaaccatttagccaaccttgtaacgactcattgatccaagccatcggactgttgatgacaaaatacataatcaaggcggttataaatgaacctactaatggcaagatcagcacaggtgacaggctttgcagtgagtcaggaatgcctttgactaattttttaagagctatgatcgtataaccggcgataaatccagccagcatacctcccaaaaagccggaacctccaatagttgccagcatacctccaatcataccaggtgccaatcctggacggtcagcaatactatacgcaatataccccgctaatacaggaaccatcaatgcaaaagcagcactaccccctgctgtacttaaaaaagcggcgaaagcattatagtccgggctatttgggtcagccgcatgaataccaaacataaacgaaagcgcaatcaatataccgcctgccactacaaaaggaatcataaaggatacaccattcataatatggctgtatattttaggctgctttaaacgtgttttttcttttgcttctttaagagtactgttgccttgattcaaaacgacaccttttccagcaatcgcatcttcaattaactcttgtgcatgatgaactccatttttgacagaggttttgatcactggacgatcgccaaaaacatccatatcgactttgacatctgccgccacaataataccatcagcttcagcaatatcttcaggagtcaattgatttccaacacctgttgatccattggtttgcactttaatgtgtacaccgagttccttggccgcatttttcaatgcttccgcggccataaacgtatgggcaattcctgtaggacagcctgtaactccaaccacttttttgccagcatactttttaggacgttgaagtgcctgcgcatcttgctcttctgcctgttcaaataaacggacaatctcttcttgatctcgagcaaggataagttttgctctaaatagttcatccatcaaaaaggtcgaaattttggataatgtttgcaaatgttctgatgaagagctttgatcgactgcaatcataaaaaataaattacatgattcggtactatattcaataccgcttaatgatctgcccataataatggcaggggactgtactccagtagacttggcatgtggaatggctattccgaatcccacttctgtaggaacctgttcttcacgtgcccagatatcttttttaaattgctcaatatcgcttaaatagccgttatcgttcaacttttgcgacaattcatctattaattcggctttggtcgtagcggtgacatctaatatgatattttctggttttaagacattagaaatcttcatgatggatctctcctcttaaatttctcccagtttataaagggatgctttacccgtagaaccgaacagatccatttttttcttcaccagttctgttgccgctttggtcgcctcaggcatcagctgatccggttcatatgcattcggattcgcatcgagtgtcgctcttaattggttgtagaatgctcgcttcatatcggttgataaattgatcttcgctatcccatgcttcactgcttctctaatctcttcatcaggattatctgatccaccatgcagcactaacggaatttttactttttcatgaatttgtttcaaacgatcgattttgatcgaatgatctttggattgcggataaataccatgtgaagtacctacagcgacagcaagtgtatcgatacctgtttgttctacaaaaatcgccgcttcttctggattcgtatacaaaatctcgtcagccccaccttccgagctgccttcattactcccaatcgtacctagttcaccttctacagatacatcgaccagatgagccagttcaaccgcttccttggttgccgcaatattctcctcaaaaggtaaatgagatgcatccatcatgactgatgtatacccattgcgaatcgaacgtgtaatatctttgatcgtcgctccatgatccagatgaataacaaacggtactttggacttggatgccgcttctcgcacataagctataaacccatcagtgactagatcaatttcattcgggtgaatctgcataattgcaggcgaattctgctcctctgcggctgtaatgaccactttgacgaactcgctattggctacattaaatgatccgactgcaaatttattttcatacgctactttaagtaaatctttcatattaattaacatttgaattcctcctagatttatttggaagaccagacttccaaaaattcatcgtaattggtgatatggagtagtttttctgtcatattggtctgtttaaacacatcgtaaatttcttcgaaaaatttggtgttattcaccttctgatttttcggcggaataaacagaaaaatgatctgcgccatctgatcaccccatagcattttctgcttattaatcgctaccagtacacgtagttttttgttatctccacaatcaaatggatggggcatcgcgaccaaattcccaaaattggtactcgacattttttctctttccacaatactggtatataaatgctgaatatcgcctagttctgtaagtttttttaacaaatcaattggattgtcttcatttaggaaaaaaacatcatctggtgataaataatatttgagtagtccacgatttaactgaatcgaaatattcttcatatcatcacttgtaatcatttcacttaccagaatgatattttgtacatttaactgctgttgttccgcaatctcgctcgttgtgataatcgtttcaattccttcgggaagaagatgtatttcatgattagctaatagactatcgattctaatattcggaaaatagagattaatcttacgctccaatagcttgccgactaatagatttttgccataaataattgcaatacgctttctgttatcttgagagttctcaataatgcccataatgtgtaacgtcaagtaaccgatttcattttctggtattttgatatttaagcaaaattgcaattcttttgccaacacaactgcgacattataagcattggtatattctgattttatttgagcaataaaaggattttcgacagggaaataatactttaatggatataatgatttggtaatatgagctaataatcgatcaagtaactcttggtttttgtagctgatgaatccatattgctctccaactttttggatcactgatttgattttttgttccatttcattcacgtgttcatgcccgatttcttcattttttttaggtaagatctgcaatgcgatcagcaggtaacctaaatactgatactcatattcatcaaatgggatatccatttcttgagccagacggatcagaatagattgggctatttttaattcttcaaagcttgtatgatccaacctcatatcctgttcagttattttttgtgcaagacttactcgtttaagactgatcaaaacattcacacagatcgagaataattcttgaaaacttagcaataaattatacttggcaacctcttcttcaatacaagcgtagataaaatgaatagaagattcgttgaaccaatcgccaaaatagtattgcagtgcttcgtctatcggcatgtgtttgagacaatcggtagtgactagttttttgagcaaaatccgtttctcaacttcgcttcctttaagccggataccttggaaaataatcgcttcaatttcgatgttctgcttttctgcttgaatcgtttgcactaatttttgcacgtctttacggatcgtttgagtcgaaaaataaagcgttctagccagatcctcatacgtaataaaatcagtctgcgataacagtgctttgataatatgaaatgctctttcttcgtcatcatcttcatttttatacaggctggataaatccccgactaatttgtatcctttgcgagtatttccaataatcattgctttatctaaataattttcattcatttctttgatgtcattgcgaatcgttctagtcgttacatcaaatagattagctaattcgcttccactcacaaaatcatgctcagattgttttaaatgctctaatagcttaatgtaacgttttctcatttggctttcctccttacacacatactaatgcaagcgctttatatccaccaagcctatactctttcctaatagttaggaagtgatcgtgtattcgtttatgatacccactttttttaaattctaagttagtattctatttaagaatcgtttgggaaggaaaacagaacacaaaaaaaccaaccttctaaaaaggttggtttgtgtgtatagtaccactacatccataacaataaacgcgatccctacaaacactacctacactaggcccttaacggtttgttctggttccaaatgtaattacgattgtactaacctataatccatagccacaacgccaatccggccaacgtgatcaacagtgtcgggatcgtcaggatgatacctgctttgaaataatacccccatgtgatcttcacacctttacgggataacacatgcagccacagcaatgtggcaagtgatccaatcggggtcattttgggacccaagtcggaaccaatgacattagcatagatcaatgcttcctgaataataccttcagtatgtgcaccctggatggctagcaggttaatcaacacggtcggcaggttgttcatcaccgatgataatacagcagcgatgatgcccatcccgagcgaagcagccagcagaccatgctctgctatggcatccagccagcggctcagatgatccgttaaccctgcattacgcagtccatatacgacgatatacatgcccaccgagaacaccacaatcgaccatggcgcttccttaattacccgtttcagatcaacagcctcgctcttgcgtgccaacaaagcgaacagcaacgcaacagagccaacgataaccgacacgggaatcggcagaaactcactggatgcataggcaaccaataacagcccaagcatgaaccaagcgattcggaacatccgtggatcacgtatcgcttccttggggtcacgtgccgcggagatgtcgtagcgaaggggtatgcttttgcgatagaacaaaaacaacatccccgtactcgctacgattgagaacagattgggcacaaccatgcgtaccgcatactccacaaatgtaatgccaaagaaatcggccgaaacaatgttaaccagattgctgacgaccagcggtaacgacgtggtatcggcgataaacccactcgccatcacaaaagccagcaccatgcgttcatcaaacttcaatgcacgcaccatggccagcacaattggcgtcagaatgagcgcggcaccgtcattcgcgaacaaggcagacaccgcggctcccagcagaatggagtagaagaacagtctgcgaccgtctcctccagccagccttgccatatgaagggcagcccattcgaagaaacccgtctcgtcgagaatgagagaaatcataataatgccgacaaaggccagagttgcattccatacaatggatgccacatccgaggcatcgtttaagctgacgactccacacaacagggcaagtaatgccccacccgaggcagtccaaccgatacccaatccacgaggttgccagatcaccaaggtgatcgttactacaaaaatcagtattgctacgtataccatagagcctcctgctgtaccctgtatcaatatattatttcgttaattcaatcttatactgtaagattacaccgctctatgcgcggaatgaccagacgatatatttatacagggcaacaggaacattgtctatctttattttcttttaatataaattgtgtggtaagttatggtgttccaatgttaggatttatcgtttcccttatccttcggtgtatcctctaccatcttgaacatgccaagcagtccttgtaattgttccgccatgctattcagatgtgccgaggatgatgcaatctcttctaccgatgccagttgttcttgcgaagatgccgacacggattctgtattcgcagccgattcctgggtcacattcgaaatatcactcatcgccttggcaacgtgggatgcaccgctctccagttgtttcgttgttgcggacaagtcatccaatgtatgaacagcatcttccaccgcctcccgaatctgagcaaaggattgtcctgacgtattcacggcctgaattccttctcctacccgggtctgagccgcattcatagcgattagagcggcatccatgtcctgacggatattatgaaccacctcaccgatctgcgctgccgaacttccggattcttctgccagtttgcgtacctcaccggctacaactgcaaacccacgacccgcatcccccgctcttgccgcttcaatagaagcatttaatgcgagcaagtttgtttgtttggagatggatgcaatgacatcaaccatgctaccaatctcaacggaacgggcattcagagattgaaccaccgtccccagctgctccaccgtttcctggatactgttcatctgctccacagcctgtcctgctgcctcattcccagatgaagccgctccggacgtatgccgcatatttgccgtaatcgactgcacacgctccgacatcattcgaacatcttctgccattcggctcatctgtcccgatccgtctttcacgctgtttacctgctgctctgcaccttcagccagttcctgaatggccagtgttgaatgttcaatcgctttggtagtttgttctgcactggcagataactcttgagaagaagcagatacctgctctgtcgtttcctgtacgcccagaatcatcatccgcaggttatcgaccatacgttcaaaatacttcgccagttctccgacttcatctttacgccctgtttccattttcacggtcaagtcacctttactcacggctctggcagattcctgcagtcgtttaattggacgcagcatggagcgtgtaaaccatataataaagaggagtgtaaggaacgtagccgccagaataacaataaatgtggccatgcgaatatccttacttgcattagttacttcactcttgagcatcgtgcctgcaattttccagcctgttgcttcatttgttgaaaaaatcatcatcttcggctgatcgttgaacacgtaatcgaattgaccttctggaccttcatacatctcatccagcaagccactcgtttccggcgtacctgcatctgctacaggggatacaacatagtttttgtttgcatccataataatgacgtagccttctttgcccaccttaatggatgtctgctcttgcaggtctgtcaggtccagagataaaccgatgacaccggattgatcctttaatgttttggagataaacacaactgcaacaccatcggtattaacagatacagctgatacaacagctgtacctggcttttccatcgctagtttgtaccactcccgctccctagggtcaaaagcatctccccgtgtgctgctcgctgttggtttacctcgaaccatgactccgtctgttgttcctacaaaaatattcatggcatcgggatgcaagcccagatattgctccagcttcaactgaagctcgggactatcgttctcccctttgatcaagctcggatcaagagcatccgcgaaatagttaatgtcatgaatcttgtaattcacttggctttctacaatggtattggcagtgctcacactttgcatggcactatccactaattgtccttgtacgccatcttcagccatcgttagtgtgattaagccgactgccaagcttggcaggagtagaacggccaggaaggagaccaatagtttgttccttatattccagacaaaacctttctttttcttctttttattttgactatgttttggtttggcaggtttcgctgctttcattggtttattatcctgagtttcactcatgtctttctccccctcaaaatgtaaaaatgccctctttctttgtatgtatggatcaatctaaaggcttatcttatatatcggctaaatgagggtatttatttgagagaaaaatgtgcaggcacgccaaacaagccacctctgatcagaagcgacttgtacaaggtacaggttactaattattccatgaaatagatgaagtattagagtacggaccgcctgggggttgtgccgagggtttaccaaaatagtagccctgtgcaagctcaatacctatggaacgacagaattcaaactcttccatccgttcgatcccctcggcaaggacttgccctccaaatcgactcgacatctcaacaatgtgaagaattttctcttgtttggtcgaatcctgatcacaacggtcaataagacttcgatctattttgacaaaatccggttctaaccgattcatcagctctattgtcgaatatccggcacccacatcatccagcgcaaccgacattccacgggaacgatatacctcaaatatttgctgcaagatgggcatatgctgaatctgctctgtttccacgacttcaaacacaaaatctttggggtccagcgaaaggcgttcaatcgcttcaaacgtatgtgtcagacaatattcgggattgtatatggaggaaggcaggaaatttacgaagcgtttgacaccatgcggtagaaaaagggcactggtctcaatagcagtaatacgcgccaatcgatccagaaaagaatgtagtccggtctcacgcgcaacttcaaataattcataggaactgaaggattttccattctcagcaggacgaagcaaaaactcatatccgataatctgctccgatgcatcaacgatgggttgcatatgactgctgaattgatgctccagaataatggaaacaagctccgcatgtttgaaacgggactcctgcatggttagactaatccagctttcttcattagcctgttcgtaaataggcataatctgaacggttagggaatcacgtaatgtcggatcaatttcgccgatctcttttattaaattctgaaccgtctcaagattcgaaaaatccatccacatcatgtcatccgacgtctcgataagtcttcccggcgtttgtagcgcttccagcaaagcgggggaaatgggacgcaagtacaaggtaccttggccctctataggatagattggactgcagccactgcaattcatgtaggaccccccttgccaatttagattccatgtccattaatgttcacttgtatatacccaaagtttgtaaatattatatcatgggtcttaaaattaatctctactgttttgatgacttcctgtatgacggttcttggaacaaatatattcaaattttcagaaaaaaagaccgacagtctgatgactgtcggtctccctcaacttataaaactttaagaagcgggaatcacgattttctgtccaactttcaggttatgcacatttgagatttggttagctgtcgcaagcttgcgccagtccacaccatattttaagccgatacggtacaagttatcgccttttttcaccacatataccactttgccgcccgctggtttctcaggctgtggcttggtcgttggtttggttggagtagtcggatccgtaggtttagttggctttgtaggcgtaggagcaggctccgtacctggtttcggagttgttgttgcttctccagtcaatttcatgccgtattcagcaaaaccatcatcatttgtaccaatgaaagacatcgccgggtttgcttcaaccagatcttttgcatccggggaagatgcgaacaccacttcaaggtcgttaagtgctgctgcggttaacccagcagatggtttgattggtgccagggaccagttgccgtccgctgccggattaatcgttttattctcacggatgtagtcgatgatcacttgacggttctcatccggtgcagccagaacgatacgtttaccgtccgggttagccagcttggatgaagaagcacggtagttattcgtcgctacgatgaatttttgtgctgggtcaatcggtttaccgttaaaactcagatccttgatccggcttgccgatgcatttacaacggttgctttgccgtcatacttggctggttgtgtcacatcaatctgatacgttacaccatcgataacatcgaagttgtacgttgggaagtcattgttgatcagttgttgttgtccacctttagccgggtcgatctggttgaactgacctgcagaccattccagccattctttcagttctgcgccgttaaccattacagcatgtaccgtatttggatacacgtacaggtcagcaacgtttttgatggcaatggtgcctttaggaatattcgtgtaatacgaagcgcctgaacgtccaccggctttgaacggtgcacctgcggacaatacagggattttctcatattccgtaccttgcatatgtttttcgacataccatttctgtgcattcgttacgatctgaatggatggatcatcctgaaccagagcgaagaagctgttgataggtgcagtcgtttcgcccaccggaccacgaacatactccaatgtaccttcatgctcttcatgaaccgcatcaatgatgtcctgatcagcctctaccagtggttttttgttggctgtgtcatagattgggcgtgcttccgttttggaatcgaccactttccatttgccatccacttgttctagatccagatcaataatccccaggtgatccccccagaatcctggctctacagcaggaacgccgttaatggtgcccttctccaggtctaccccttttttgccggaaaaatcagcacttgggaacactttgtgggcatgtccaaacagaatagcattaatgccttcaacttggctcagatacagaacggagttctccatcagatccgtttgaggaatttcctcaaatccggagtgaggaatagctacaataatgtcggcacctttggctttcatttcaggaatgaattttttcgcagtagcaataatgtctttggcgatgaccttaccttcaagattagcgctgtcccattgcatgatttgtggcggtacaaatccgatcacacctactttgatcgtatgttctttgcccgtctcatccgttacttttttatccaaaatctcatacggtgtgaaatagttcttgtcatttgtctcatcatcatcaccatcgtctacataaacattggcattaatgtaagggaagttcgctccctccagcgtcatgtccaggaagtccagaccatagttgaactcatggttaccgatgttacctgcatcataatcgagcagattcatcgctttatatacagggtgagtctcaccctttttcaatggatcaattttggcagtgtagtctcccagcggattcccctgaattagatccccgttatcaaatagcaggctgttcttcgcttcgtcacgggctttcttaatcaatgttgctgttttagcgagtccatattggtctgtctctttgtcggaataataatcatagttaaccagattggtatgaatgtctgtggtctccatgatccgcagtttaactttggcagcatccgcagccgacacaggtaccggaaataccgcaagcacgtttaatgcaaccaaagcggcagtcaggcttgataatactttttttctcattttcaaaataacccctcccggttatgtacattgaatcatgcattaatgggcaaacgaagagcgcagaaaaaagatagatttcatgggttgtgcgtactgacgctctgatgacatgcatcggaatttcaggtaagtttatctcacatgaacatctatttatgtctgtgcttgtcgtttacattccaaatcataacgcaatgttcagtcattgaaaagcattattttttacattacccgcacatacctaggcgagtttacattatcatgcgtgatttcgacatttttttcaacattttagtaggtatttagtgcttattatctttgaaatacgtatattacatgtgccttacatgtatatccaattcagcgttattcatccataccaaaaaccgtgaaaccttaatggctttcacggttggattaaactctgcgcgtattttcgcataaggacgctactttgcagaggttatgttcatattcggattattgttcccacacatgattttcatgatctttccctgtatattcgatacgagccggggtgatgtccagaatgacatagttcggatcattaggtccatcgaaccacgccttcagttcatcgttccacacttgctcacgcaatccttcgttcttcgtcacttcacaggttccttcaatctcaactacttccttggaaccaccagcctcataaccaagtagcaggctaacattcggattattctccagttcctctactttgtgtgtacggcggttcgttgccagatgaatgttcagtccatcgttgaaaagcgccatatagcgggatttcggtttaccattctccacagtggagaaactgcaaaaagggttgttttccaatgcttttacaatgttttgttccaattcagtctggttcatgggaagtgctcctttcggttttgggggtatttgaagaacgttgtaggcggccgttgcgggtacggatcgttctttggatcgctgttatccccagatttttttgattcccttttctcaaagggaaaatccggtgataaaggcgaacgctttgcttcctcagaatcgattccgtcccctccactacgtctactgttctcccaatttgaggagtgggtaagctaaagttcaaacagaaacctgtacttaactttgcaggtttcgtttctttaggttttatccgctccgttgctgtgtataagtacagtcaacttacgttaggtgtaataagcctgtacttatagtgtacccacctcacctatggtgaatccatgaaccgatacgctaaagtgacaaaattggaaaagttctttatagaaatgtttacataaagagattagtacgaaatttcttcatggttgatttaattcagatctccaagatagattgaagaagagcctgatttaagaagcaattcgccaatggtttttggatataaacgaatctgggatagctcttcaagtgcaatccattccacagcgacttggtggtcgtctggattggagccttcaaaaacggttgcctccggatctatgaggctgcacgcaaaataaaattcaacctggtggatgtctgcatcccactcggcgaattcatgattttttccgatatactcccggatatgtaacagctctcccacattcacggcctgaccgatctcctccaaacattcgcgcgcgaccgcatccttgagttcttcacctttctcctgtcctccacctgggaacacataagcggtaccatactggtcttccagccggatgaccagcaattgtccatcctgcacaatgacagcctttgccgagttgcgtatgggtttcattctgttcattcactccttgtcattccaaaatttcaaagttcaatccgaacaacctgatactactgttgttctgctgaacatggttatcatcccgtggtatgcgcagataatttaatgccttccgattccagcacacgacgaatctcttgagcaaatgcgagagcgtttgctccgtcaccgtggatacagaccgtctctgccttaatgggaaccaacgtaccatccgtggatacaacgacttcgtctttcaccatccgaagcacttgagcaatcgcttgtcccgactcttcaatgagggctcctgcttggcttcgaggggttagcttaccatccactccataggttcgatccgcaaacacctcgctcacactgcgcataccgatgcgatccgcagcgtgaatcagctcactgcccgccagaccatacaaatacagatcaggctgcacttgatagatcgcctcggcgattccttcagcaagcttcatatcttctgcggccatattatataaagctccatgcggttttacgtgatgcattcgccctccacttgcccggacaaatgcatccagcgcaccgatttgatacaccaccatgtcatatgcttcccgtggcgtaatgtccatacgtcttctcccaaacccttgcaaatccggcaacccggggtgggctccaatcgccacctgatgctccaatgccctcaccaccgtcaggcgcattgtagccgggtcccctgcatgaaatccgcaggcaatattggctgatgtaatcaagggtagaacggcctcgtccgacagcgtccgatatataccataactttcgcccagatcacaattgatatccaaggttttcgaggtattcattaagcgtcccccattcctgccattcttctgcgtatcaacttatccatgagctgcatattgatttcctgttcaatatacaactgtccagcttgatcatgcgtaatctttttaaaagaaatttgggttcctggcttagtctgagccaggattggcatatccacccgagctacctgtgcaatgacaggataacctccaatcgtctgatggtccgccatcaagatgatgggctgaccatccggtggcacctgcaccgtgccataggtaacggcttcagacagccgatccaggggctgatccagctccagtatggagccttgcaagcggtagcccatccgatcggattgcgaagaaatcacgtatttttcggcatagaattgtcccagacttgccttactgaacagcaaactatccttgctctccatcacacgaataacaggttgcccataatagtcaggtctttcacgttcagataaaagccacgcaggcgccaatattcggtggtcccgctcactctcctttacctgctgctccatacgatgcatccagccttgcgcttcgacagaaagttcaccattggataacagatcccccacgcgcaaggctcggccctccacaccgccaagacctgtcttgaggtctgtacttcgactgcccatcacttcaggcacagctattccacccgcaatcgccagatatccacgcaaaccatgacgacattgaccaaacttcagtacacttccagcccgcaccagcaccggacgccacaagggtacaggcagatgatccaccgttgccgtcagatcggctccacataacgagactagctggctctcctgaaatcgaagctctggccccgtcatcgtcatctccagtactgccgcatgtcgggagttgcccacaagcatattggctgctctggctgcaaaggtgtccatgactcccccaggatgaataccataccggcgatagccggttctgccttcatcctgaacggtagataacaggccagggcgaatcacttcaatactcatcgttcgccctccttccgcttcaacgccagatactcctgcatcgtaatctgttcaaatcgaacccgatcacctgctgtcagcaaacttggtacgttctcttccggccgaaacaaccggagtggcgttcgtccaatacattgccatcccccgggtgtatccactggatagattcccgtctgtttgccaccaatacctactgtacccgcctcaacccgaagccttggcgttgcccgtctgggcgtagcaatctgttcagacaacccgccgagatacggaaaacccggtgcaaatccaatcatgtgtacgagataatccccggatgtatgaatcgcaataacgtcttctggggtcagtccatgctcactggcaacatagtccagatcagggccccactcgccaccataacatacgggaatcgtgaccgttctgggtttgttgtcttgtacggattccttcatttgattcaactgctgaagcagaatccggcataactcggggtacggggagatgaacggatcataaaatactgtaacggacgtatatgaaggtacccattcgatcatggctgacagagtgcttttttccagcaaagcacatacagacatcactctgcgctgcaccgcttcagacaaacgatctccacactggatgataaccgctgtctcacccagcggagataggatctcctccgtccatgcatacgtctgtttggtcatgcgccatctccccctttttccaaacgttttgcgtatcgttatttatctctctccaatgcctgcaataccagtgaacaaaccgccggaaacggctcatcttcttctgtacgtatcgcaagatacagtgtctgcaaaaacagacgcacattcaggttcctatgactggtttccagaagtgatctgttcaccgcctggtctccttgatgaagggaatcgatccacgtcgtaatatcctttggctccaacagattgcgacgcagaatggtaatcacagcatgcgctattcactgatcttcatcatggatgtaaaccacacttgattccgttatttttacagcgagtgcatgcagaagttccagcagatccgttcgctccagatatggtgattgtgccaagtcttcaaccgcatccgccgcatgtgcgggggcatgtgcccagcccttgttatcggcgtagccgcgaacatctttttcacgttccagatatgtagtcaacctatgatgaatccctgcgatatcttcttggtccaggaaaggtcgctgacgatccacattcagaatgggaggcagtaacaatactgagaacgtacgcgtaaacacactatccgttccctgctctccgatcgcatagaacaggtgctgatcgtccagcgccaactgcaacatatgccttagctgatcttccgaaaatacaccctgtccaatccatgttgcaaacgtaacatagatcaattcatcccgcaggacagggtcagtactaccaatatgcttcatcatatgcagtgccaattcgtaaggctgttcctcgtgatcaatgaaatgattagacgactgaatatgctgtaatttttgttttaacgtcagggcatccatctattaagactccccgggcgaatccaaatgcacactgcaattgtacagttcacattgccacgtattctcattcttggcgatccgggtaatggatgtgttggacagcttcacgctgatatccagttcaggcaccagacctcgcagtgtattccgcagaacggccccgtgactgacaacgatcactcttccatcggggtgctgctgtacaatatcttcaagcaccgccctgcctcgaacagtccctgcatctgcaagctcccgtccaagatccagggtactccagtccgctccccacttggctaaccgttcctcttccgttgttccttcgacctgtcctccgcccatctcgcgaagtctagggtccagatgaatctcctgaatatccaagcgatcaccaatgatgcgagccgtctcacttgcacgttccaagtcacttgcatagatggcatcccaggattcttcggccagtctcgcggcaagtaataccgcctgttcccttccttcctgatccagcggattatccgtctgtccctgtgaacgtttttccttattccacgctgtacttccatggcgaatcaatgcaatttgagtcattgttgctcctcacctttttctatatgaagttcatcttctgtaaaatgtttgcgtgccttcggcttggcaaatttgccgccgttatattgatctgacccgtttctcggaatcgagagactgtcccaagctgtttctttgagcatttttgcggcaaatacaatctgcccgacatgatacggataatgtgctaattgccgaataatggcctccatcacggtatgaccttcattccgaatatatatgatatgagacaattgttccggggtaaacgaacgaatggcttcgagtagacaattccagccttcctcccatttggcgagcaactcttcccgggacgaaatatcattcacgaactcggcgtcccgttcacgccacggtttctcaccatctgttgtcagtacatccgtccagcgggacagcatattgccccatagatgttttacgattaccgcaatgctgttcgcgtcttcattccaggattgaaacaattgctcggaatcgagttgtgccatggctttttccccgagctgcttgtaatacaagaattgcttctcggctgtctccagaaaaacctgattcatatccatccgttaaccacccttcgaaaaagtataatgtccccagatcacgtccaaatagaagcgtcacatgttatttattcaggaaatgaaaacgtaccgtctgcattcggttcaaatggaatgactttgcgaaccgcatccagattgagctctccatagatatgtggatatagttcatttaattcgtagagatcctcatataccagttctggctctaacgccttctcatcaatactaagtaataatagatccgtgcggcctgcataatattgcccggctacccatggaatctgttccttggtggaacaatgaatgaatccgtccgtttccaggctatctggtgcatacacactcccctttgacacttgctcccacaacgaacgggaaataatactatagatcatggttctgcctccttcaatttctgcgatgtaccctatgagtcattggaagtattatagatcatcccggatacgggagtacaatttttgatccgtaaatacacctttgatcttcaactgtttgcgtaacaaaccttcgtacgacatacccagcttctccattacgcgtgcagagcctatgttgcctgcattacatttcccctccaaccgattgcagtccagttcccgaaagcaataatccacgatgggttgcatcgcttctgctgcgagccccttaccccattgactgctggctatcgcgtaccctagttcaccactctgcatgggttcgttaagatgaaaaatgccacccctcccgatcagggtccctgtttccttcaaaacaaaagcccagatatgtaccgttttccgttcataattatctagtacccgctgaatatattgaattgaatcctccaccgtctcatggtagttccacaagctttgctgactcactcgcggatcagaggaaaacgcataatattcatcaagatcatccatcgtaagccgcctcagctttaaccgctgtgtttcgaattcgggcaattcggcaaaaagtttttctacattcatgcagcacacctccatgattcacttgagttcatgatccagccatcttatttctcaggaaataacgatctatcataaccatgcacagaataccgaccgtatatcgaatcagatcaattaccagaaacccatgtcccagtataagcgcacctaatacggtagagcgtatctcaatcagccaaggcgtctggatcaactgcgagaactcaatcatccagctgaatacacagctcaaacacatcgcccataccaagctgcgatgaggccacaccatgcgtactccgaaataaatcatgcccgcccaacatgcatccccgaaatgttcatgcacccaacccggcaatcgttcaccgaagtgtctggatgcgagtcctgccgccatggtcatcatgactgcgaagaaatagatcagcctatctctgataagtacgcttttcaatcaatcacacgccttcatcaagcacttgtaaaataaattgcgttttggcagcggtatacgattccctatcttccttgttctcatcagcaagctttgtcttcaggacggcgtaagcttccaccagatctgggcgttttctcagcacatcccgaaaccgaatttgacgatcccagcgttcttctcccgggcgcatcagatgaaggtgtacagctctcttgccatccttaaccctgacccagaatcgtctgtactcccgtccatccagttcaggcggaacgtagttccagcccaacggattcagctggtccacaatcagatccatgtcatcccatgactgtacctctgccatcagatcaataatgggcttggcgggtaaccctggaatggacgtgcttccgatatgttcgaattgatgaatattaaactgctctagaagacgtttgagttgccggatttcatcctgagcctgcgcatcccaattggggttggccggagcaatctctaccgactctgtcgcccaggcaggccaattttccggttgcattggatctttcattcaggtatctcctcttcaccatgacattttaaatggtacccttctctgtatttttcataggtgcgttgcttcatgcgcttaatcgtagtactccgttgaaatgtaagtatggaacttagggataaaagaagatatttcaggtaagccagatcactagagttagcgtctgagcttataatcgaagctttcatattcatcccatccaatccccttatatagttgttgaagcagaaggcatttcagatacatatttctatatatccaaaaaaggagcgtatgtctacgccccttggttgtctgttaccttgatgatattgatgattttaacgatgtcatgtactgaaaccaatttttggatcatgcaagatgctttattatatgaagatttattttaccgtaacggggatcgtcacttttttgttgccccacttggccgtgatggacgttttacctttgcctacagccacgatcttgccatttgtcactgtcgctacgcccggctttgtgctgctccacaccgcgctgttcgtcacaacagtggttttacccgtatcatactgtgccatcacactcagcgttgtacttccctgtggggacaaaaccagttttttctggcctgtaatcagctttttgagcaatggtacaacggtaacctctgcctttattgtctgattttgataagttcctgtcaaggtggcttgtccctcggtcagcgtcttaacggttccatttttcacgatagctacatttgtattggaagaggtccatacgatttgttttgaaaggttaatggttttaccattcgcgtaggtgccgatgaccttcaacgccttggacttcttgatgttcagctgcattgtggcaggagtgacctcaactttggtaatctcgtccgtcacagcaacgggaactttcacaatcgttgttccgtacttgccttgcagcaatactctgccaggtgtaacgcctttgattttaccgttttccagcacagccgaagaagtggatacggaccacacaatctcagacgtcacatcctcttcctttccattcgcacgggtaatgcttactttcggaagggtgctttcactgcctttaacaaaactgtaggatttcggtgaagctttgatgcttttgatcttctcctgcacttggacaaccaactgggctttagacccgtctacttctgcaaaaatggttgcttcacctgcggccacagccttgactttgcctttcaccatcgtagcgactgctgcattactggtggaccaagtcacgccttcggtaacatcctgcttgttatcaaaaccttctaccgttgccatcacctgaagcgcagctgtttcggaaacactcatcttctgcgggttgctattggttatttcaatcgatttcacgtcaccagtagccgccaaggccaacgaagggaccagtacggttaatgcaataattagagcaaatgtgcctcgaagcgccagtttaattctattcatttttaattcccaactcccataatccaatattttacttctattataatatatcggatatgaattgcataaagttgaataacataagtgagagtcttggaacaattcatgagatcagcgtgtaatcgttataaaaacctttgaatctagcccaacatagtaggaaattggtttatgtaaatactatttcagttgaaaaagggatgtccatcgtcacatgcaacatgacgtgtggaacatcccctttttgaattcctaaagctttaactaacctctttacttcacttcatcctgctctggcaaaatcaagctctcggcaccgcccatatagggccgcagggcttccggaatgtgaatgcttccatcctcctgctgatgattctcaagcaaaggaatcaggatacgcggcgatgccaccgccgtattattcaaggtgtgacagtagaccaacttgccttcggcatcgaggcaacgaatattcgaacggcgcgcctgaaaatcatgcagattcgacgacgaatgcgtttctccatatgcaccgcggcttggcatccaggtctcgatgtcatactgtttgtacgttttctgcgacatatctccggtacatacagcgacaacacgatacggcagttccagtaattgcagcaattcttcggcgtgtcccgtaatctcttgcaacatgcgctccgattcttctgcatcaggggcacagagaatgacctgctcaactttggcaaattggtgcacacgatacaatccgcgcacatcccgtccgccggagccaacctcactgcggaaacacgtcgataccgcggccaacttcacaggctcttgaacatcaacaatctcatccgcataatacgagaccagcggcacttcagaagttcccaccagccacttgttctccccttcaagttcatagacctgatctcgaccggttgggaagaatccggtgttcaccagtgcttcctccctgaccatcagcggaacctccatcggtgtaaacccgtgcttcagcaacagatccagggcaagttgctgtactgcccgatgcaataacaggccagcaccttttaatacataacttcgcgtaccgccaatcttaactccacggggaatatcgatgagatcgtgcaactccccaagttccacgtgatctttgatgttatactcgaacgttggcacctctcccacacgtcgcagctctacattgtctgcgtccgacgagccattgggggtatccggggatacgatattgggtaccagccattgcagcttggttacttcctcctgcacaggggcgagcctcgcttccacctgttccaactgttcattgatctgtttcacctgagcccgcaaaccctcggcctgttcccgattcccggcttgcatgagtctgccaatatcagcagataacgtattgcgcaacctgcgaccttcttccgattcctgcaaaagtgccctgcgttcctcatcccgctctaacaatgtgcgaatgttgatcttgatttttttcccgtctgctgcggcctgaacctcttcagcatgtgcacgaatccacttcatttctaacatggtcaccgtctcctttggctgtaaaaatacaaagagcgccctcatcccttgggacgaggagcgctctgctcgcggtgccacccaacttgctgaatcaggatatcctgcttccagcctcttggtccgcgataacgggcggttccggttaacttggggaaatatcgctcccctggcgaaaacgcctccgagttggatgctcttcaacggcatggtccgatctgtaattgttggtctcagtatatacgaacgccggaccagattgcaaccttctgtatcgatcaggaattcatggcacaacttaacatgtcctgttatgatagactttgtcttcaagattgcactttattgtgatcctcaatttatgtatataagtagaaggagttctttatgaaaaaattactttggatcggatgtctgtcctatttcctgatcggacttgcccacgttgtgctcggttccattctaccggttgcacttgaacattacggcaaagattatagccaaggcggaacgctgatctttgctcaatttgcaggattcctcggtggtgtattgttatctccatggctgaacagacgctttggtaaacgcgggggcctgttaatcgccacagcactactctgtattgcagaattatcctatatgctgttgccaccatggggctggatgttcgtcattgcacccgctgccggctttggattcggaatggttgaagctgttattggcaccattatcatcgctgcaatcaaagacaatacagccgttgctatgagccgactggaagtgttattcgggattggggcgatggtcatgccgctcattgcaagcggtctgattgctgccggatactggcgtctctcctttctcgttgttgcgatctgcgcagcgctgacctttgttttctgggcgaaaggatcattcggtgaactcgataagtttctggagcgacagagttcaaatcatgcttccgtaaatacgcactctgctgggacatcgggtgagatgcatcccgcatctgcaagtacatccagtccaacctatcgtggccgtaacaggactcttctggtattattcgtcctattcttcttcctatatgttggcacagagatgagtcttgcgaacttcatgccagcgattctgattgagaaaatgaacatgaaggaagccggagcagcccttagtgtcacctgtttctggattgccatgtccgtgggacggctcttcgccgggtatatcgcagagaaattccaataccgcgtctatgtcctgtacagttgtcttgcatctgttctcttgttaatgatatttccatttacaaaccaaatctggtctgcatttctcatcatcttactgcttggacttgcgatgtcagggatattctccattgccctggtcttcgccagtaaactgctacccggaacagaagaatccacacccagcattttgattgcctcaggtggggttggcggtgccattctgcctttgactacgggatggagtcttgatcatctggccgttaatcagtctgcatggatgcttgccatctttgcggttggcctgtttgtcattagcgtaatcacgtatcaatggcagaacaaacatatagtgaattctgcgacttaacaattctgtatcgatgcagtcctaagaattagaattacctattattgagattgagattgaaatgtctactgtcatgacctgacggtgggcatttttttgtagcgttactctgttctaacgaacctagcacacgctatccccctccatttccgcatgtttgaaatctaacgaatcctagagacgttattatagataattagcttcaattaaatgtctcgttggaggttttttgcataataacaccgctgagattcgttaggttttcattcccttagaaactggcctaataaggtgtcctcgattcgttagcgctgtgatatggcggcagtgccctatctttgcctctctcatcacctttcattaaaggtgagaataatatctattcatttgcacaagattgcccaggaaatacttatggtcaaccaaatcacacacttttattaacgacaggcattacgggcccgttatccttgatgaatttaccgaatacatatcggacgagtggtcccagaatgatcaattgatatggaagcgcaaggctgaagttacgagcaatggtatggagatacgtacggagtacggatgccccacttaattgatccgcgagatatgccgagatcattccatacatggacatgatcagaaccatgccaatcaccatgaaaaatgaaatgacgagcacacctaaaatcttattggacttgtcaaagggcacggagaatgcaatctttctcgccacaggaccaacgatgaaagactccaccagaaacgcgatgacaaaacataatatgaattgaagcagtatttcaagcggggacatcttgccgagtaacccactgtgccatagattgaagaacatcatgaccaagaccattcctgtacacatcattaatcccaaaataattttttccttcttgctggttggcaattctctcatcctctctgtttaccttcgtaattatagagatgaggaaaccctccacataagtgaacattctgtgaacaattgtgatttttccaatttaaaactatatttgacaaccatgtagtacagccctatgatatcccttaaaatggtagaaacattcattatataaggaggatttggattgtgagttttcaaaagcgcattgaccacgtcggcattgccgttcgtgatctggagaccacgctgcgtttctacacggagatcgttggtcttgaattgaaagaccgggtgacccataccaacggtatcattcagctcgccttccttggcttcaatggaagtaatgagactgagattgagttaattcaaggatacagcgacaagctgccttccgaaggtacggtgcaccattttgccatccacgtggatgacctcgattctgagtacaaacgcatccaagccaccgaagccgaatttatcgatggagagattattacattgcctaacggttaccgctatttcttcatctatggacctgaaaaggaatggattgagttcttccagcgctaagaattggagctgatttcatgaacattttaattaccggcgcagccggaaaaattggacgtgacttgtcccaacacttgtcagaagcatttcacctgcgacttacggatttgaatatcgacagactgcatacgtatcaagggacaagccatgagatcatgacactggatgtgacagaccccgaagcctgtcagcatgcttgcgaaggcatggatgtggttgtacatctggcgggagatccttccccgcatgccggattttatgaatcgttgttggacatcaatatcaaaggcacatttaatgtattccgtgcagccaaggaccaaggtgtacgaagagtcattctggcaagcagtgcacagacgatcgaggggtatcccattgatgctcaggtctatccggacatgccgacacgcccacggaatttgtacggggttagcaaatgttttggagaatcgctcgcttcctattttgcgtataccgaaggtttacaaagtgtagcaatacgtataggtgcatatgatgattttcaaccggacggacccgtgctggaggcaagggatatgagcgcgtatattagtccggctgacttgtgtgatttgatgttcaaagcaattacaactaccgatctggaacccttcaccatactgcatgggatctcgaataatcggtttaaacgattaaatctggaaaccactcagaaacaggtaggttatgacccaaaatccgatgcttttgcactcagtcagattgccttatatgattccccacgataattattgagaatatcacatccaaacaggctgttatacatatgtataacggcctgtttataacttatacgtgtccctatccagttcatgactggacaggtcctaccctctggcctataattacacctagtaatgcccgtaacttcatagtttcccaggggagtcggaattggccggctgagagtgtatcccaccaagatactaacccttagacctgatctggatcatgccagcgtaggaatcggagtatatcgaaatggcacagccctatggctgaacgccacctctctaacgcctgcacgcgtcccggaatacggggcgctttttttgttactatcagaaagtataagttttgaagcatcaccttcctgatattgcaagaaaaactgccgctaagagcagtctggcttccttgaatgacatcgatggacgttttacttgttcaaaaataacgtcatccggatctcaactggtataaatctgtcgatttatgcaagatgattggatatgaagccaaggagtaccccgtgccaatcggccggacataccgaaggagagaaccacagatgaaatggcgtaaaacgatgggactgttgctcttatgcgtgcttatggtgactgtagccgcatgtggtggcaaagaagctgccccagctgggcagaacggcaacacaaatacggaaagcagcaacgaaggtgacactaccgccctgaaagatattaaagtggtgctcgactggacaccgaatacgaatcacacaggcctgtatgcggctgtagatcaaggtttttacaaggccgaaggcttgaacgtggagattgtacaaccaggtgccggtggcgcagatacaatggttgcctccaatgaagtgccttttggcgtaagttatcaggagagtgtaactcaagcccgcacacagggtgttccactcgtctccatcgcagcagttattcagcataatacatccgggttcgctgctccggcaaatcggaatatcaagtcaccgaaagattttgaaggcagaacctatggcggttggggttccccagtcgaagaagccgtgatgcaatccattatggaaggcgacggagccgatgtatcgaaagtaaaaaacattaatatgggtgatgccgactttttcaccgcagtaaaacgggatattgatttcgcgtggattttctacgcctggacaggtattgaagccgaactgcgtggggagcccatcgacatgttatatgtgaaggattattcagatgcattggattactacacgcctgtcctcgtaacaaacgagcagacgatccaaaacgaccctgagatggtgaaagcattcctgaaagccacctccgaagggtatcaatacgcaattgatcatcccgaagacgcagcgaacattctgatcaaggccgtaccggatctggataaggaattggtgctggcaagccagaagtggcttagtcccaagtacacagatgacgccccgcgctggggagaacaaaaacaggaagtctggcagaactacaccgactggatgtttagcaaaaaactgcttgatgaacagatcgatgtgagcaaagcatatacaaacgagtttttaccccaataaaatttctcatataaaacgaacttaaattttatacgaggacggagaggacagaaataacgtgaaaaagcgaagcggtcgcctttatcaccggattttccctttagagaaagggaatcaaaaaaatctggggataacagcgattggaaggttattctgtcatcgaagtggcaagtgtaacagtcattagttcattttatatatcacgaaaggagccgtgatctctcatggcaagcacactacttagtattcaggttatcccgaaaacgccaaatggcgagaactcttatccttacgttgatcgagccattgaagttattcagcaatctggcttgaagtatcaggtgaatgcgctcgacacaacgatggaaggtgaactggaggaactgctggaagttgtacgtaaaatgcacgaggtacttgtggaggctggcagcccaagcatcatctcccagatcaaaatcgcccatagccctactggcttcagcatggataccctgacggagaagtatcgctaatgcctgcctatttcaaaagtgtatggccgcccattgtggcggttattctctttatagcgatatggcagggagccgtctccctcttccatattgagaaatggatgctacctgcaccatccgacatcgcccgcgaagcggcaacccaggccgaacgacttggtatgcacgcttccgcaaccattcagttaacgctgattggattcgccgctggaacagcggttggattactgattgcgatggtgctacatttagtcccttttctcaagtcagccctgtatcctttacttattcttagtcaaaatatcccaaccattgcgctcgcaccgctcctgttaatctggtttggattcgggctgttgccaaagctgattaccatcatcctcgtctgtttcttccccgttgcagtggcggccatggacggcttgacccgtacagatgcagcgatgatgaactatatgcgcatggctggtgcgaaacgtcaccagatcttctggaagctggagcttccccatgcgctgccatccgtgttctccggtgtcaaaattgccgctacctatagcgtgatgggcgccatcatcgccgaatggattggtgcagacaagggtattgggtattatatgatgctgcaaaagtcggcttatcgtacggaccgcctattcgtggcgatcatgattattgtcgcgctcagcttgctgctcttcctgttcattgccctgctggagaagctgctcgtgcgctggcggccacaaaagcggtagtaaagaagtaatctgtatattaggaagtgatgaccatatgaatctgcaacaggatgaacaagtccagcctggacgaggagcaagtgtaatggagccaacgcacggtgaaaagtttaactcggctacgtctgatcgacctgccaacacgactcctgctccggttccacctgcactggacgttgttaatgttcatgcatcattccgtgaacggcgtagcaagctaccggttctgaacggcctgtccctgactgtggagcaaggcgagtttgttgctatcgttggaccttctggctgtggcaagagcaccctgttccatatcatcggcggtctgctgaagccacaggaaggccaagtgcttatgaacggtcagaatgcaacgggacagcgtggcaagatcagttatatgccccaacagcctgctcttttcccgtggcgcaccattgaagataatgtactgcttgctggtgaagtagcttcaagtgctccacctcgggccgaagcacttgcagaggctcgaaagtggttaagcagcgtgggtcttgccgggttcgagcaggcctatcctcatatgctgtcgggcgggatgcagcagcgtgctgcatttctgcgtgccctgctcagtccgcaggaactcatgctgctggacgaacctttcagcgcactggatgcactgacacgtagcgacatgcaacgctggctgctcgatatctgggaacagaaccgccgctcggtgctgttcatcacccacaatatcgaagaagcattgctacttgcagatcgggtctatgtattatccaaccgacctgcaacggtgttgcacgaggtacatgttccttttgatcgcccaagacgagaagaaattacggaggaatccgctttcctggagcgtaaacggcagattgcacagtggatgcgagaagaacagcagaaagcccgcctatcttgatagtgcgggtttttaagttatttatttcctttaatgggtgatccgccataagaaattctgcgtaacatagttagaatataactgaacacaaggaggaattccctcgtgcattctcaagcttttgcaccattaattgatgctcatattcacttcgatcagtatacccctgacgaacaacgcgagatgctgctatcgtttccgtctcagcaggtcgaagcagtcattgccgtgtccatgaatctcgcttctgccaagaccaatctggagcttgcaaaacaacatccacgtaacatctatccggccttcggtttccatccggaacaggaactgccgtccgttgcagaaatggacctcttcttccaatggatcgagaagcatatgggacaagccacagccataggagaagttggccttccctattacaatcgtcaggaagcggagcaggcagggcaacgcttcgatcagagcgggtacattgaactgcttgaacgtttcatccaacttgccaaaaaacataacaaaccacttgtccttcatgcggtatacgatgatgcggatatcgtctgtgatttgctggagcaatatcagttccgacgtgctcatttccactggttcaaaggttctcgccaaaccgtaaggcgcatggcggacaacggttatttcatttccttcacgccggatattcggtatgaagaagagattcgtgaactcgcccggcaatatccatcggaacaagtgatggccgagaccgacggaccgtggcccttcgaaggaccatttcagggacgaatgacacacccggccatgaccagacaggtcatccaggcatggagcgaaatcactggcatgggaaccgagcgggccgcccggctcttttatcagaacacaaagcgtttctatggcttaacttgagtacaatcaggtaacagcaagtactatcgcttgtcctgccagcacaacacaaagaagccagtcggcttcgccccgactgacttctaatttacatatataatttatcgcttcaagaatcctttgccttccaggaacggtctcacttgcaaccttgtcggctcagtcaggcgcttcgccatcagttcggaccatggagttgttcgttcaccgttagtccgtgctttcatgtacgccgtcgttgtctcatcatactgctcaacacctttgatgctctgctcggcattataacgattacgatgcagaactgcattaagtggcagacgcgggcgaattcccgtttcctgatctgcaacaccaatacacatgccatacaccggatataccccttccggcaattccaacagctcagcaacttcctcaatccgggtacgaagcccgccaatatatacgattccgaaccctagtgactccgctgcaagagcggcgttctgggaagcaagtgcagcatcaatcgtggctaccatgaaattctcggttgaatcggcatacgattccttctcaggaagatgacgtttcgcggcataactcagccgatacagatcagcacaccatacgagaaacaccggacattcattgacataggcctggttgcctgccaattcagccagcttggctttttgctctaagtcagtcacagcaattacggtataggcttgcacactacttgaagaggaagccatctgccctgcagatacaatggctgcaagctgctcatcacttaccgggtctggcttgaatttgcgtacagagcggtgtttcatcatcaaatcaatggtttcattcatggctgttcactcccaatcctcgtagtacgaactcaattgtctgctcagcaagctcgtctgtattcatatcctgataatcaaagccaaatcgtgaattcttggcccgtttgtgcgccaaagccacacccataacctgaagcatcgcataagatacggactcgacctggaacaatccctggtcttttccttcttgcagcaggtccctcactcgggtccatacagggtctagaaaacgaaatacggttgctgtacgatgtgtacgcagtgtaatttcaagctgcacaatatcgctcatctcccgatccgtcatcgtgaacttcacaacttcaccaataattcgtcggataccttccacaggcgaggacatggactcttcagccagcgcgttcatcatatgcccaggaaagaaatgctcaaataatgcttcgaacaccttttctttgccgccaaaatgataagacaccagcgacacattggcacctgcctcatcacatatttgacgaacactcgtcccgtcatacccctgctgtgcaaaaagcttcttggctgcaagcaatatcctcgttttgatatccaactccggttcagtcattccgtcccgctccctcttgtccgttcatctcattcgctccagctcaaggactgcagccagcgaatcatctgtctattatattacaccaagcaccccgatgaaaatcatcggggtgcttgtcctatcctatgatgcaatggtatacatctgttgtattagttgtttgcttgagcagggcttggagccatagctggcatgcgttgttttttcaacaacgtcacgaccagtgacaacgcaacggcaaccaatagcacaatcacgatagagcccgcagcagactgaactcctgggcctcccaactgcacgctcagaataccctgaacggcgtatgttgcaggcaggtactgcccaatgccgctatagaagctgttcagcaattcacgcggtaccattgcaccggaagataccagctgcaaggacagtgagatgatgttgaacagacttcctgcaggtccgaagcagatcaggaagaactgggagaagaacataaacgtgcacaggaagagcgcctggaacaaccagaatgcaacgaatccttgtgcaatctgtcctcccagtgccacgatcaatgatgatcccagcaaggaaacgaccaatgcagaacccacgttaatgactactctcgcgccaaacaatgtcaatcgggaataggtagatgacagcatacccatagctgtctggaggttcatccccatgatcatggcacctacataggaagccagtaccatcatcatcggcaccatctgattattcatcccgttaaccgggttgatggacgttgtcgttccttccactcgggtagtcaggtttgtagcggcttcagcagcctgatcggcaggtgcacctgaagcggtcaacaccgtctgtaccccttgtgctgtagcttgtttgttaatcgtgtttgtcacactttgtgatacaccttgcatcatgcttttaatcgtaaccgggttcgcttcattaatggtgtatttaatctcggcggttgagccagccgtctgaagcaattcgttaaacccagccgggatatccagcaccatgtgtacttggtgatgattcagctgatccaacgcttcagccgcacttagattggatacggtgtggaaaggcagtgttcctgcgagcgaatccgcgattcctttggacatttctccgtcctcgttcacaatcgcaaccgtcaattctttcgcacggtcatttactccagaatatgcggtcatccagatcacgctaaagatcacttggaacataagtgctgttacgatccctacaatcactggcggttttttaaacaatgtacgtaaagcctgtaacataaaaggtgtcctccattactcaaatagttctaatttgatttaaacagttgtttgaatcaaacgatcgtttaaattttatgtgaatatgtccatattgtcaactcattttttgaaaaattcagaaaacgtaagctttattcatgaatacaattgatccattttcacaaaagagcattatgctttcctttctccgtagaaaagaacatctaataccaacgattcaggcttattttctggcgactcaactgtatttttctcaacaaaaaacacggtccgccgcagcgaaccgcgtatttattcatcctcacttcattgacaatgaggcgttgaatatatctccaaacaaaggtcggtcagtcatttctcttcagcttcatgcgttgcagacgtagggaattcaggacaaccgacacggagctgaacgccattgccgcccctgccagccatggagccaagaagccaactgccgcaataggaataccaatcacgttgtatccgagtgcccagaacaagttttgtttgatgttccccatcgtgcgccggctcatctcaatggcatctgcaatactgttcagatcaccacgcatcaacgtaatatccgccgcttccatcgctacatccgttcctgttccgatcgccatcccaatatccgctgtagcgagtgccggagcatcattaatgccgtcacctaccatcgcgactttcaggccactctcctgaagtttcttcacttccgcagctttaccctccggcagaacctcagccagtactttaccgatccctgcctgttcagctacagcgcgagctgttcgctcattgtctcccgtaatcatgatgacatcgatccccatcgcctgaagacgaccgatggcttcacgagaggtatccttgatggtgtcagccacagccacgatccctgcccactgaccatctaccgctaccagcatcgctgtacgcccttgttcctccagacggttcatctgctgaacggtttcctcagagacattcacctgtgcatctgcaagcaaacgacgcgtgccgaccaggatctcctgcccttttactgaagctcgcacgccgtatcccggtatgttctcgaacttctctgttggggttagctccagacccttggcacgaatacctgcaacaatcgcctctgccagcggatgctcggaactctgttcggccgctcccactcgctcaagcagaccagattccgtccaattcggagccgtgacaacatcggtaaggaccggtttaccttgggttactgtacctgttttgtcgagcaccacggtctgaatttgttgtgccgactccagatgttcgccgcccttgaacagaatgccatattcagccgcacgtcctgatccagccatgacagaagtcggcgttgccagccctagtgcacatggacaagcaatgacaagcacggcaatcgctttttcaagggaaccggcgaagtcacccggacttgcaaacagataccagatcaggaatgtcagcgcagctatgccgacaacaatcggaacaaaaatgcctgaaatgacatctgcgatccgctggatcggtgctttggagccctgagcttgctcgactactttaataatctgggacaaagccgtgtccgagcccactcgggtcgcacgcagtcgtaataccccgtttttgttcagcgtagcacctgtaacgggatctcctggctttttatccacgggaaggctctctccactaagcatggattcatctactgaggattgcccttcttcaacgataccatccaccgggatgctatcacccggcttcaccagaaccaagtcacccaccgcgacatatgcggcaggaaccatcacttcctgtccatcccggatgacacgggcttcacgtggagccagttctatcaggcttttaatcgcctgtgaagagcgacctttcgccacagcttcgaaccattttccaagcaaaattaacgtaatcagaattgcacttgtctcataatagagttctaccgaaggcatggcggcggctgtgctcgttcccattgccccatgatccatggttgtagaaggtaagtacccactggataacgtcagatagagactgtagaaaaacgctgcactggtacccaatgcgacgagaacgtccatattggcactgcggttacgtagggctttgtacgcccccacatagaattgccatccaatcacgaactgtaccggcgttgccagcagtagctggaaccaagggttcatgaatagttcggggacatagattccggatgtgaacgagaaatgcccgaccattgcccacagcaaaggaatcgataacaacgcagatatcatccatttccactttttgcgttgcagctcacgttcacgaaccgatgtggtctcttcttgtgtcaattgcagttcagcaccgtatcccatctgcttgatcttggcggtaatatccgaaggtttcaatgcaccagcggcatattcgatatgccctgtttccagcgccagattcacattcgcctgagatacccccggtagtcgggaaagacctttttcaatccgggcagaacaagcagcacacgtcatacccgtgatgttcagatcaaccgattcggacaccgtaccgtagccaagcgcctctactttatcccgcaacgcgttcacgttagttgtctttggatcataagatacggttgcctgttcgatggcaaggttcacattggcctgatgcaccccttccatgcgggacaagcccttctccactcgtgtcgaacatgcagcacaggtcatccccgtgatgtgcagtgttgccttcagtcctggtgcttctgccataggtgccattggtgtgggttcggatgatctatccattggtttattcgttgagttatccatcatgtcagctcctttcatgtcgtttcaatttttgtatgttacacccaacatacccccaaggggtatatatcagacagaaaattaggcttaaacctgactcttgggaaaaggtactctgacctctttttcgcccatgagcatgttcggtttaagcctgtaatcccgttagactacatcgtatccctgatcttcaatggcagctttgatctgatccacgttcaccgtctgctcatcatattccaccgctaccgttcccgctgccagatcaaccttaccactcgcaccggtattctttacagcttcttcaaccgacttcacacagtgattgcaagacattcccgtaacgttcaacgtaacattagacattctaaattcctccttggggtatattaaaatgataaaattaaatatgtgaattgattcagcttacttcattaacttccgcatcgtaaccagcagttcatccacaacctcatgttcaccagcctgaatacgctcaacgatacagctcttcatatggccttcaagcaaaagtttacctactgaattaagagcagactgagccgccgcaatctgcgtcagcacatcatcacagtacgtatccttctcgatcaatcccttgatcccgcgaatctgaccttccacacggttcaaacgagaaaccaggttactcttcatctcctgcgaatggtgactcttgcgcacatgcttcccatcactgccctcggcatgacaggatactgcttcatggactgtagccaaagcttccgttgaatctgacttggaggattgcaaaggttcctcgggatggctctgatgatccatcatgaacaccccttttctttcgttcttttctaagagtaacataccccatgggggtattcaagaggattctgatattttattaaaaatgatgaatccttactaattaaatagagcgatgtatcttacaaggtatactccatcctgctgctgcggacgaccagacccatctgttcatagaaagtctgtgctccagagttaaacgtcgacactgataattccacgctgtctgcctgaagctctctccctaactcgatgaatgcttgtagtaactgtttacctgttccttggccccgatgtttgttatccactacaagttcatggatgtacaacatcttgcgatccaccatcaatgggttatcctgaattacacttaactgcgcgctcccgtaacccagaatcaagcccgtttcggaagactcggcaacatataggtaacgcttgtccgtttccagcagttcgatgaactcctttttctccattctggtctccaacgctctgtatagatccggccgcgcctcgacatgcatctggtgcagctcatccatcaacaatgacacgccagagtagtccctcatttctgcctttcggatgttaatcgtacctgtacccatcccaatcactctttcgtctactgaattttacattattatacaaccaaaaagcagataccataagggtacctgcttcgctaaatttatcttcattccatctagcccatatgatgctcatgttgtttattttttcgaagaagtatttccttcattaaaagcaacaggtgatggcttcgctgcccattcgtccgcctgcggctcaatgtctactccgctcaaaatcttctttttctccatcaaggaatccccgtcttcatccagcttgttgcgaatttccgcctcgtcctgaggttgattgttctgtgtcatcgtagaatcctcccttttttcgtattcatgttgatgttcctttatataacgtgcccactttctgcattatcattctcagcaagggacaggccgtccccaagttaagctaaatccatctctaaaccctttcgttaatcgaaatcaacctgtttatccaaaatgatttcctctactttgtattccatttctggtattgagggaatcaaggagaatcgaacgttttccagagaagaaggaagggcaggaaccactcggaaactaatttgcgtctccccacctcctccacgactgccatgtctcatggtgatatgcctctgttcgctgaatatttccagagccaaatgtggaaccatttgtatacgctcagcttcattccccttatattgaatctccacataaacgaggctttcaccttcatattgcatcgaatgcgtgatcatatactcacacgaatctttgatcatttttttcataatcggcaccacactcgtcaattgaagaggttcacttggaaagtagtgtctttgcggcatcggttgcacgctacggagaacatatcggatatcttcctccttcatatccagcaagttcacccattcatcgatggtattttgagggggttggtattggactgctccggttatgccctttctggctgcaaccagtttcaaaagttgctcatcaatccgctgtacctcatcgctgtattcattaggaatttcacgtaattcactccagcccatatttaatcactctcctaatttaatgacatgccatgcaaatacaattcgccactgtacctgcatccccctcttaaaaaggaaaggacgccccttgggtcatattcatgaccttacgggacgccctttttatattgtccacctcaaatggacatcatctactgttttgcttgtaacaatgagcaaaaatgtatacttgccttaaccaacctacgcctgatcttggcgagcaagcgcggctagtgcgcgtagcgctgccttaatctcgcgctccaccgcttttccaaccgcatccgtatgcggatcatactcggctgccaggtcactgtccgcgaatccatcgatcgcgacaatggctccggcgcgagcgccacgcaaggtgctgacgatgtagagcgccgcaatttccatctcagccgcaagtgctccagcctgcttgtacttgcggtgtggaatctcttccacgcctgcaaagaacgcatccagcgttacggtgataccaacgcccactctgcctgcaaatgttgcagcatccgcgctttcttgctcgcgagcagcttcgatcaacgcttgtgtcaccccaatgtccgctaccgctggaaaaccatccggcaccagttggcgagtcaacccctccgtacgaacagcggctgtactcacaatcacactgcctgccggataatcagctgtatacgatcccgctgtacctacacgaatcagagttgttacacccgcgcgaatcaattcctcgaaacacacagctgctccaggtgaacctacaccatggctgaccacagcgatctgtaccccttcatacaatccaacaaatgtacgatactcccgactgaacgccagttctctcgcctgctccagtttacgggaaatcttctccgcacgtgccggatcaccacagacgatggcatatgccggcatgtcttccgaatgaatctgcaaaataggcatcaacatatcaatcaaactccttcttcgtccactcgtcttccggaatcggcagatcttcacccgagaagcgttgttccttgaacggatcagcaaaatggtggaaaccattcacttcccagaatccgttccggtcttctgtcataaactccagaccacgtatccacttggcactcttccagaagtaaagttgtggcacgaccatacgcagcggaaaaccatgtttgggtgttagtggctcaccgttatatttgaatgcaagcagtacatcatcatgcatcaactcttcgagcggtacatttgtctcataatcatgatctgcatggatcatgacgtattttgcctctggcttaacccccagaagtttcacaaaatcggaaaaacgtataccttcccacggcgtatcgaatttcgaccaacgggtaacacagtgaatgtcactcaccgtgttcacctgtggcatcgcctgcaactcagctaaggagaacaccttctcctcttctacttcaccgaataccttcaagtcccaggtggacaggtcatattccggcacttccccttcatgcagaatcgggaatttctccgtcagcatctgtcctggcggcagccgatctccgtgatcgttacctgttttgggtgccggggttttactttttttcaaacgttcagccttgttatgcaagtggaattcctccttcttttactgtctctaacatagacattcagaattaacgcgagcttccgcccgctttcagtgcatcctgtgcataggtacggtctttgaaaaagaacatcgcgaccagcgttacaatatacggcagcatcaacgtgaaatgcgttggcagggagaatccttgcagacgaatactcaatgcttccatgaagccaaacagcacactggagcccatgacgccaagcggattcgcttgtcctaacatcgttgccaccagcgcgataaaaccacgaccagcagtcatgccttcggtaaacatcgtcacctgaccgagcgacaactgtgctccagccagagcacacaacacaccgcacatcagaacggcaccatactggatgccacgtaccttgatcccgatgctctgtgctgcaatcgggttctcaccgacggagcgcaggcggaagccggatacacttttgaacagataaaattgtagtgcaatcacgagcacaataccgaggtaaaccagcggactatgtcccgatattacatcgcccacccacgggatgtccttaatcagcggaatatcccacttgggaagtcccaccatgtctttgtcgtagtatgcaccttttacatcaaaaatcgcacgcagtgcaaaggtcgtcacccccgcagccaggaagttaagcgagatcccgaccacgatggcgttggctttcagattaatgcttataaaggcaaagagcgccgagaataacatcacaattataatggaaaagagtaccgccagcagcacattgccaaacagataattaccgacaatagcggagaacgcaccgatcagaaccagtccttcaagacccacgttaaacagaccgacacgagaacataaagccccaccgagcgctgcaagcaggattggagtcataatccgcaaggttgagccaaacatggctgcatcaaacagttgttgcattggactttttctcctttctccgcttcaggaatgaataaccgatctgagctgatacaaataacgtcaatacagcttggatgacactgccaacttccagcggtacatccgtgttccgttccatccccatggcacccgtctgtagcgcagccagcaaaatagctgctacagctgtaccgagtggatgcgagcgggcaagcaacgttgccataatgccgctccatgcgtaacttgccgatgacaatgagccatcaaggaaacggtactgtgtaccgagcacttcccccgcacccgcgagtccagcaagtccaccactgatgaccatggacagcatcatcatgcgaatgcggcgaacaccaccgtaggttgcaaaggacgggttgctgccgagcatgcggatctcgtaaccagtcaccgttttatgcgtgaaccagtagatcagaatggccgctacaatggcaataatgaaaccagcatgcagtcccatgccctggaacaacttcggcaaccagatactctggtcaatcatcggagtctgtgccatcgctgcagatcctgtgcggtccttaaatggataggagaccatgtaacccccgaaataaatggcaatatagttaagtagtagagttgtgatcaacaagttcatcccgaagcgtgcatccagccagcctgcaaacagggaccagattcccccggcgataatacctgccacaatcgcagcaatacacacaaaccagcctggtcctggcagatagagcgccgtgagcgcggcactaagcccgccaagaatcatctggccttcggctcccatattgaagaatccggcacggaatgccaatgctacgccaagtcccgccaagatgattggtgtggaacgagccaacgtattggtgaagaagtagaagttaccgaaggcccctttccacatctccgcatacgtatccaccacattaccgccaacgatcagaatcgccacagcccctgcaatcagaccgatgaatacggcaagcagcggctgtacgagtccgcgaagtgtttcttttacccgattcatatccgctctttccctcctgccattaacaaactgatctgttcctcagtcgcttcttctgctctcagttctccggcaatttcgccttcatacatgacaataatccgatcagataattgcaaaatctccgacaactcggatgaaatgagcagaatacccgcgccctcactgcgtttacgcaacaattcggcatgtatcgtctccatcgctccgatatccacaccacgtgttggttcggctgcaatcagaaacggtgtatcctgtgcaaattcacgggcagcaatcaacttctgcaagtttcctccggacagaaactgtgccttggtttccgcagaacccgtcttgatgctgaactgttggatccaactctctaccattgttcttgctgctttggctttgataataccgcgtgactgcaagcgatgatggtgtcccatcagcccgttctcgcgaacactcgcatccttggccgctccccacatataacgatcttccgggatatgagcaagtccatgctcccttatgcgccgtacaggccagttggttgtatcctgcccggagagtacaacgcgaccactatccgccttacgcagtccagcaatgacctgaatcagttccgactggccgttacctgagatgcctgctatgccaacgacctcacctttacgaacttccatatggatgtccttgagcgccgaacgatccttcgctccggacagattaaccccttccacctgaagcaccgcttccgctggtaccgatggctgcttgtccatacgcacaagttcacgaccaaccatcagacgggataactcctccacatgtgtatccttggcttccaacgtacctgtcacctgaccatcccgaagcaccgtgattcggtcggctacatccatgacttcttgtagcttgtgcgtgatcagtacaaaggttttgcccagcttggcgagagatttcatgttcgccagcagttccttcacttcaagcggtgttagtaccgccgaaggttcatccaatataatgatgtctgcgccctgatgcagcaccttgagaatttcaactcgctgctgcatgccaagcgggcactcggacacttttttccacgggtcaaccggcatgccatattgtctgccaagctcgttcacctgagccgctgcttttttgcggtcaaatgcgcctgccttagccggttcgcgtccaatcacgatgttctccgccaccgtaaaggaagggaacagcatgaaatgctgatgcaccataccgatgccacttgccatcgcctgggacggcgtggcaaagctcacctcacgtccgcggactttgattgtgcctgacgtgggctgttccataccatacagcatacgcatcaaggttgttttaccagccccgttctcaccgacaagggcatgaatctctccctcacgcaaattaaaacggatgtcccggttagcggtgaagccgccgtatttcttcgtaatctgctccatctccaacagcatatcttgcgttcgctcctctcggtctcggtcatttaatagcagcaaaaccggctgcctgatcgggcagccggctgatcatttccatcactcattcattgaaaagtacattcgaaactattgttgcaatggatctttgactacgattttgccggatacgatatcatccttgattgctttaaccttgtcgatcacttcttgtccgacaaaagcattcaatggagattcgctgtcacgtgtaacgtaagtcaggcctacaccgtcttctttcaaaccgtagtttactgcacctgctttgaagttgccttctacgaaatctttcacagtctcataagcaaccgtatcggttgacttcaattgagacaatacgatatgttccgggtcttcaacagtacggtccgtatcctgaccggaagtgtagaagcctttttccttcgctgcttcgaacacgccgagatcacctacagcggatgcgccagcgatgaagtcagcgccttttccgaattgtaccagcgccaattcttttgctttggctgggtcattaaatccacctacatagttcacgaggaattctgcacccggattcacggattccaatccagctttgaaaccttccgtatatttcttgatcaatggtacatccattgctgcgatcatgccgactttgtctgttttggtggacaatccagcagctgcaccgagcaggtacgccccttcatattcacggaaaccaacactacgaacgttaggaagatcaacggttgtatctacaatcgcaaaggacttgtccggattctctgcagcgactttcttcaatgcatcttctgcctggaaagttgctgtaataatcagatcataattctcggcaaccgcagcacgcagattttgttcaaatgctgccgggtctgtcgattcaatcgtcttggtatctactttgaattcttcgcctgcttttttgaaaccttcatccatctgtacaaagaaagggttaacccctattttttcgggaagtacgagggccatccgaagagatttctccgaatcactgccttgggcggattgttcgtctttggaagccgaattcccacaagctgccaacaaaatagccaacatgatgatcgataagacgaacgataaacctcttttcattttgaaaataccccttttcaacattcttttttcttatcctagcggatactgtcgatccttgtcaataaatctttgagcgtatacactcaaatagaatataattgacaattcgctttctaccaagctttggaaaccgttctgtatcaagctttttttcgttgacatccagcgcgtctccgtgctaaagtcaatccaattattctattctgataggaattgtcagaattataacccaaagctgattattttccaacccattttaaggaggctattcatttgaaaaaaatcacccagatcacgttggcggccctactcgccgctccggtaacactcggcagccttagcttgcccgcttccgcttctgcagcatctgcaactccggctaaacccgccacctcacaaagtgtcaaaggaccggtagctcaggcgccagttgcctatacggaaagcgcagcggattttgctcaattcttgcaagcgaaatacaacattcaattgccgcaacagattaccaaaggtgatttcattcaagccattgcagccatcacggaagcaactcaagcaagtgacagtgaagccaaagctcctgtctttaccgatctgtcttctggtgattcttcatatgatgctgccgtatccttatacaataatggggttcttacgggtacagaagtacgtgctgaggatcaactgagcacttatgcagcggtcttcatcgcggtgaaagcagccggattcaaggaactggcttatacttatcctgcagagaaaacagccaaagcgcttgccaaagctggcattagcccaaaccgtgttcagggacaagccgcacaggagctggctgctgcgatcgatacaggcctgattcctgaaagcctataccccgctctccttaagggtggcgtagcaagtaaagatttcgctaatactttgcttggacgtgtactggtcagtcaagggaaatacaaacatgagattgggcgttccggcgatgcggacatctattccaaattgtatgctgcatatcgcacagcggatctgatcgaatcacctgagctgagaaagattgtggatcaggccctgcgagatgatctcgtaacaggttacaacctgaaggatagccgctttgattccaactttatcgatgaactgacacttacctacggccacgataatattcaacatgctgtacagttggttggtttgctgcgtagtgaaggcattgacgccgatgtacaattccagccgaagacatctgccttcatttatttgaaggaatggggcgagccgaaggaaacgcctgattataaagtgacacagattgagaacggcaactatattgcttctgcgaaggaatatgatattcagttcgagttcaacaatgtggcagacaaagttcgcttcaacgacattgtgctgaaatatgccaaaaagaacagcgacagtacatctccactgattctcagctcctggtggcaaccgctgtattattcaccaaccgcattggcgaactaccctgtcatttccaataataagatcgcgcttggcaattattatgctcagtccttctctctgaaagaaaatgccaaatccattcgggaaggtttcctgaaactggcacctgatgcggacattacgacgtatgacttctgggtggaccagcctttcttcaactatctgaacggtggatctgaataaaataaattccgtcttcaaccgaattaaagctcgtattttggcaccataagcagccgtccttaccgaattttacaggggtttcgacccctagattcgtaaaggcggttttttgtttagcattttgcaaatttcctctaaaaaatcatttttctcatgcaggaattaccaatataaggtcgaatcctttatgtacacaaacacgcaatcatattgcatatctccgcacgaacaggagttactccatggtatatgacggtattctactaggcttgatcgttggattttttcggggcgggttgcggcatgggctcaaccagtttgcagcactcaagctgcgaagtggctggattttccctgtattgctactaatccagttctttattttctatctccaggaacgattcgaatgggtggcatccattaatggatatctctttgctgccgtctacattacagggctcgctttcctctggctcaacagacaccataccggtttcatgctcatctggattggggtatttctcaattttgccgttatggctgtaaacggtgggcgcatgcctgtttctgtggaagcctccgctgtactgggcccctactatgtagacatgctcagggaaggcggcgccgtatcaaagcattttatgatggatgcatctacaaatctgccttttctcggtgatatcatcccactctccagcccttatccacggactcaggtcatcagcatcggtgatgtggtcatgaatattggcatattcctttttattcaatacatgatggtgaatcgggacaaaaaggctgtgcaacctgctaaaactcatcaggcttgaagaaaacaggtagactccaaggaagggaggtcttctccatgaaaaaatttgaaggtgtgaaatattcccgcattgtcatcaacgcaatcatcgtggcttctgtcgttgtagcattaacttcgggatacaagctgggcggctagtatccataccgccaaacaagacaaacaggctgccagcggcctgttttttctgtctggatttttggcaggcaacttggtatgttatacatctatatagtatatccctatagaagaaaaccaactatatacacatcaagagtagactaaactcaagcaggagattttttatgaactttattcgtaaccttatccataaggcagatcgaagcagtatgtatgttattttgcttagttgtaccgggatcggtgtttttctatacatgaacaagtggtcttaccttcatctaaccacggcggattgggttatggtctacaccatgctgggtgcggcgttaattctggattatttcacattccagattccacccaaaggcaatcagcaatccatggattcatcggtataccttgcctgtatattcatgtttggcggagctttcagtttatctgtactgcttcctgtctccatcatcctgttaatcaaagagcgcaagctaacctggtggaaacacattgttaatttcagcatctacagtctcatgattacgggagcagctgccgtgtttgagtggactggcgggcaatcgggaactctggacggctataacctgattccttattttgcagcgctcgcagcctacttcatcatcaacacgatcacacttggcttattctttcatttctcaacaaaggatgcattacagcagatgaagcgggcattcgttaccgaatccctgctggtttatctgtgtacgctgattctggctttggtcctgacaattctggttgtgcacaatggcgtacttggcctgttgttgtatctaagtcttagcattctgctctcccatgcattcaggcagttgttcgtgatgtatcagacgattgaggaaaaggccaacacggatcaacgtacgggtctgttcaaccatagctatttcgaaagcatgttagaaagcgaactgactaacgctcgaacgcagggatccccgctctgtcttgggcttattgatattgatgatttcaaaaagtataacgatcggtttggccaccttcaaggtgacagtctgctggccctgctgggggattttctaatgcgaaagacggaaggcacacctgttaccgcctttcgttatggaggagaagagttcactttgctcatgccaggcatggagttggacgaatcctacaggttcatgaacaagctgcgtaaacaactgaacgacacgccgtttgaaggcgttgaagtgtttccacacggttgtctctccttctctgctggcgtcgcgccctatcaggtggatatgtataacaaatcccagcttgtggatcaggcggataaagcactatattatgcgaagaaacagggcaagaacaacgtgcaccgccacggcagcaatgatggcatggaacacgagattgatctggtacaggacgttcgtgacatcgaacagcagctcaatctgttcaggtacaaagatatggatacgtttaaacattccaaacgggtctacaaatatgcactggatatcagtgaattgctcgcactggacaatgcggaaaaacgtcgcttcgtgctgggagcactgattcatgacatcggaaaactggagattccttggtccattctgaacaaaaaggacaagctcaccgcagaagaatgggaaacgatcaaaggacatgtcacctggggcaaaaaaatggtgatcacgaacgatcgcttcgccgatctgattccgtatattgaacttcaccacgagcgctatgatggcaaaggctatccttacggcctgaagggtaacgagattccccggctctgccggatgctgaccgtgattgactcctttgatgccatgacgacagagcggccgtatcaggaaaccaagaacgtggaagaagccattcgggagctacgctcatgttcgggttcacagtttgatccggagcttgccgagttgttcattcaatatattgagaaaagaaccgctcagcaacagttgcagtaaaataaacagaacttcttctataagcccagaaaaagtaaaagcgctatccccggtctgatcggagatagcgccattttcattttcatggaatgaatcgtacaccagacaacttcattctcgtgcagattctacattaagatttggtattcagctcatgtgaggtctgatgcagctctttaatcatctgctgcaaaaacatgttgtcttggcgactgataccgtgctgattgtcttgaacaagcatctgatgaatgttctttttgagcaattcactgcgacgttccaatacttcttgactcatgttgttgcttcactccttaacatgttttgtaatgaattcacgttctatattaagtatagaggaccttctccgatagggaaaacggactcagccttcctcagctggtcacaccaaccctcacctagcgtgacaacatttcaccccttgtcgttcttagatatccttctaaatactccctgatcctccccagctttctccaaagacacagactagggtcttggacaagcttgggttataatgatcccatccctgtataaataaagtacctaaataagctaatcctagatcaaaggagttctgcattcatgtcctataaacaaattaaatggatgattctgctgatccccacattcacggttggcatctgggaatacattcgccatcagtttctgatgccgtacctttcgatggatgctggaaactggttaacacccgtcatcgtttacctcgtcagcgtgacactgctcagccgattgttccacatgcttgaaggtgccagggctgctctggagcaggaacgtgcagcaaaagcagcgctggaagctcgtgaccaattggcacgagaacttcacgacggcatatctcagtctcttttcctgctgtcagtgaagaccgataaagcaggccgcagtctggcaggcagcggacatgagcatgagatccaggagattcaaaaaaccgtgcatgaagtcaatacatatgtaaggcaagctattgcccagttgcgttttgttccttcctctacggtaacgtcagaaactatttcactgcatgcgcaggtcgaagtgctcgtcaaggaaacggtacctggtgcacagattcattgggacctcaggggtgtaacgttctctgccaaggaacaagtggaactgctcgcctgtatccgggagggactactgaatgtacgcaaacatgcgcaggctacccgcgttcaggttcatgcggaaggtaacccaattgcctggttcatttatattcaggataatgggaatggactacgtggagatcctcttcatctgaaggatcggtacggactgcgaattacgaaggagcgtgctgccgagatgggttggtcttttaccctcgattcgagaccggggcatacacgaatgacgataggaaaggagcatgcttaatggaacatgtacgtgtactggttgttgatgatcatgcgcatgcgcgtgaagcgatctgtagcattttatccgaggacagcctgtttgaagtgattggtacagcttcgaatggacaggaagcgctggagctcaccggacaatggatgcctgacctgatcctgatggacgtgcagatgccgggaatggatgggctggaagccacccgtcagatcaagctgcgattcccttatgttattgttgttatggtcacagtatcggatgatgtgacgtttctgttcgaagcactgaaacaaggcgctcaaggctatttgctcaaaaatctaacgccttccacctggcttgaatacctgcgcgccatcgtcagtgacgatgcaccgctaagtaaggaactggcctaccgaattttgcaggagttccccgcaccacgcagtgaagatgtgcaagataacccgctaacggcgcgggagcttgagattctgcaatgggtatccgcgggatataccaatcgggagattgccgatcaactcggtatttcagaccagacggtgaagaatcatctcaaaaacattttacagaagctccagcttgaaaaccgggtacaactcacccgctacgcgttagagagcgggcttgcaggacgtaaacttcgcaaataaacattgctaattcgaagtcaatgatgcgtccgacataggtgagaaatgacatagcattcatgcttttgtcacaattatgtagaccaaatcgtttttttatagcccaatgtagtcatacgcagtcattttggacaaagttataatggggtagattgtgtttaaaggaccatgaatgactacaaatctataacctgagggtgatgatttttttgatttttacacgctttaccctgaaatggggcaaacggcactgggcattggtcacctgtctgttgctcgtatgttgccttgttatgccacagtgggcatctgcccatgcttatattgttaaggcttcgccaggagaaaatgagatcctcgtagctgctccggagcggctgacgctggagttcaacgaatccttgcagacggccttttatgatatcaaaattaccggccctgacggcaatcaggcagacgatggaaatgtaaagattgatgtggatcgccctcatattctggagactggcctgcagactggactcgggaacgggacttatgccgttaactggaaagctgtatctgccgatggacaccctattcaaggggcatatgttttccatatcggtgaaccatccggttctcctgccggactgagtgatcttacatccggttccggttcaacaggtgggccgctgaaatggattgtatccctgacagactggattcagtatctcggattgtctgtcatactggggacacttgcattcttgctgttgcgaatcgcaccgacatccatgacaagagaacctatggacgttccgggtagctacagattgttatggatcagttatgctactgcttcctttgccgctctggtcagcctgccactgaatacgttatatgaatctggtgtggctctgaacgaactaagctgggcactgatcggaagtgcgctcaagctgacatcctttggtcagatctggatgttacaaatactcattgtaatgctgctggccgtcacgattctctccggatatgatcgcgatcgatccatccgtgctcgcatctggtcttcctatggctcacttgtgctcgtgcttggatggctgttcacgcatgccatgacgggacatccggctgcggcggatcaacgtgctctcgcgattgccatggacttcgtgcatctgatcggtgccgctttctggattggcgcactaaccgccatggcgatatgtctgcctccactggcggataagctgccatcgaaggtgcgaggagaagtctactgggttgctattcgcaggtttaccgcctgggggattggcgccgtagccgctctggttgctacagggatatacagcagtctgattattctgcctgcacctttgctgacttccttgttcactacagcttatggccttgtcctgatcggcaagatcgtcctgcttattgtgatgcttgtcttcgcgtggcgtcatgccagattggcaagagcagcaacgggaagcagattatccggcagcctaaaagccgaacttgctactggtgctgtcattctcgctcttgctgccgtactgacacacctgtctccaggacaacccgctgcggtcggaccgtatcaggagacaaaaactacagaagacggctcggcgatcacacttcaggtgagtcccaatgtaacgggagagaaccaattcgaagtcgatgtgaaacgtgcagacggtagcatcgttaacgatctggaacagatcacactgtcactcacacatctggacatggatatggggatctacgagatcaccattccgaaaaacgacaccggtgtgtacaaggctgaagattacatctccatgcctggacgttggaatatcaaggtacatctcctgaccaagacgttggatgcactggatgccgaatttgagattgataccgccaagccatagttacacaacgtttatattgaaaagtgatccaatctaaaatgagtgtttctacaaactgcaaatgtagtgaagggaatgaattgattttggagaagcgaagcactcgcctttattcccggatttcaacttattactatttaaattgaactattatttacactgaaacggagagggcagaaaaaacctgaaaaagcgaagcgttcgcctttatcaccagattttcccctttgagaaaagagaatcaaaaaatctggggataacagcgattggaaggttattctgtcatcggagtgtatgtgtaaaccatctttagttcaatttatatagttggatcaataaattccgggaataacggtgatcgaaagaacaattcgtaaccgaaacggcctttgcagaacgtagacactcatttaagaaaatgggccgaatcatatatgataagaactgagaggggttatttattttgaagaaaacatcatggatttccaaactaacatccactatcgcaacaggtaccgcagcattcatgttattcgccggattcgctagcgctcatgttaccgttagcccatccgttgcacagacaagtgcatggcagacgtacacgattaagattccatccgagaaagaactgcctacaaccaaaatcaccatgaaagttccggaaggtgttgcattcaagcaatatcaaccactggcaggctggaaaatcaccacagagaagaacgattccaatgaagtaacatcgattacgtgggagattgacggcgataatgaaggcattctggcaggacaattccagcagttcaacttcgttgcacagaaccctaaggcggaagctgaagtagcttgggatgcattccaatactacagtgatggcagcatcgtagaatggacaggccaaccaagtgatgccaacccgcacagtatcacaacgattagcgaagatccggctgctgctggtaatgctgcggcaggtggaggtcatgccaacgatggacatgatagtgcaggtacagaaggcgccactggagataatgcagctaccgacgatagcaaagcaaacgatgacaccacgctgggcgatgcactcaatgacaccgttacaggtgaaccaaacaacacggatacagacccgggtacgctgaagcttcaacaagcaacattgatcgtatccattctggccctgatcttgtccttcttggggattgcgttggctacacgtcgcaaaaaacgttaagaactaacttacagttttacgaaaacctgagaaaaattcagataacaaaaagcctatggcatacgggttcaaacccgatatgccataggctttttagctatcatcattttgattggctacccatgttctttacaatccgtggttaaggcactaatcatgccgctccacggtcacactcttatccacgctgattaccatccgcaatatggcatcagccttaccactctttagcgttcctgatccgtctggatcatgatctcaatgtattgcagcaagcttttcttctgctgttcaatggattgaatacgtctggacaggcccgcaaaaaactcttcaatctgctgtcttgtatgatctgcggatcggcctttccaatcgttcaggcgactgtatagcgccctcgcttcctgttcatcggcttgcagacgagcaagcagctgtgtcagttctttttccgcaattcgaagatcatttaattccaccagtaattgtccacccacttgcgttcccctcccctatgtacgtgatatcaacgctagccacccagaaatcctaattaaaaatgaaccggactctcgtcagcctgccggaaagcatccgccttctcatcaataaagttcaggaactggctggtgtgtttcatatgccatgtgccaagctcatgaatggatgcgtccaattgggtgacaattggctccagtctgcgactgcggctcgtatgcagatattgggccatgcgggttcgcacctgattcagctccgcattgcactgttgtgcattttgcttccaccgtgaagcaacacttttaagttcttccggcgttacctgaattagtccggaagctccccccactgagccaacacctgcaaccatcttgctagtctgcacaccaaagctacgcataacatccgcaagctccgtcatgatattggaaggttcacggggagttttattgattttctcaccagtggtagggtcgtatagatcattggaaatataaccattctcgaactgatactgcttcaggtcgtggtattccttcccaccaaaggtgttacccatcttatctcccatgctcatgttgtcattcatgtccttgtaattagagttgatgtaatacatggaacccacatgacgatcatagccaccaaagaatccactggcgacaaagtcacccgggtgaccaaagtttacgatctgattatcgaatccaccctcttctgccttacgtttcagtgatggagtcaagctggatattacagatggcgcactaaaggttactgccatcattcccgtatgcgctgctgcatactgagcatttccgccgcctaatgaatgcccggtcagagagaagtccaaattcttgtatttgttctgcatatccttcgcgtagtcttctgcttcgtacatttgatttggaaaaggattcagctttttatcaatctgtctatccagctcacccaccgcattatccaaatgagtcagcccggtgacgtcttttaccttttgaattccacctgataaccaatcgggtgtgaaatcggtagattgttcaatttttctgcccagttcggggatcgcaatctgaccatccgccagaaaatcaggccctttacgatcccatccggcacttccttctgttcctcggtaagaaatgaccgcctgccccgtttccggattgtaaaaagtcactgcgtcaaacccggaataaccgttgccatgcgtatcctcaagcacttgccagccgggtagattcgcatattcagtacctgctttggcattttcataagccagttccgacatcagacggtatgtttcatcatcaattcttggtgtatcccccatgttatgttcacctcccaaaattcaatacaatctacttggcaaaaggatcgtagcctttctcaatgatggctgccttgatggcaggactcattccaaaatttttgatttttttatcattatagtcataggaaatagtgaactcctgatcctcctgctctactacatgcccttccattgcaatcgagtccagtgccatttcgggtagcaactccttgcttgtaatgacaacgttcatctcatacttgtctttgaaatatttgaccgcttttgcttctgcttcttgaaaaagtgcctgtttctcactttctttcatgttctgacagcctcccaaaataaagatagatagcacaattagtaagaatacacatacctttttttgtattggcctcataccaatcaccttcttcttatgatttcaatgtatatgtgcacccaatgaatcaggatcattcacccatgccttctgcttctgttaactgaatcatagtacaaaatcaacatgaccacatcggctgagagcatcgtttttatgtatctttcttcctaatatgattcatacgcgtgttcgcgtgtatattacccgatttcctgaattttgcatcagtttagcttctcgattttccatacataacaaaaaagcatccttttcaacacatattgtgtagaaaagaaagccttttgtcttccgtcaacatcatcctcactagcctcatccatactgtctggccccggtttcgtccagttgttcacacacgagatcattgtaggatttacaccgcccaatcaattcatcatgtgttccagcatcaacgagttcaccttggtccagcacatatatggtgtcggcgcttcggatcgtacttagcctgtgggcaatgataatctgggtacatttcaacatgttcagattatgggcaatggtcgcctctgtaacggtatccaaagcactggttgcctcatccaacagaagaactttgggtctgcttaccaatgctcgtgcgagagcgacacgttgcttctgccctccagacagattcgaacccgcttcagagatcagtgtgttatacttcattggcatcttctcaatatcgtcatgaatatccgccagcttcgctgcgaacattacatcctccagcgttgaaccctctgcatgtagcctgatgttgtcatacacggtgttgttaaacacaaagttatcctgaagcacgatactgatctggctgcgaatatcctgctgctccagttcttctacaaccacgccgtcaaaatagatattaccctgtgtgggcgtatacagccctaccagcaatttcgccaaggtactctttcctgagcctgatttgccaaccagagcgaccctttgccctgctttaatcgtaatattaatatttttcagcacatcttccccgtagtccgtatacctgaaactgacctgatcaattgtaatatccccattcagctttacatctcggagggtcggtgttttcttcttgaatttattactttcctcggcttgaatgacatcatagattcgatccagcagcgcatccgccatcacgaactcgttcagcatcaaagcaagcgagttcagcggccccagaaacagcgcggccagggactggaatgaaacgagcataccaagtgtcatattcccctgcataatctgatatagtcccaccagcagaatgagcatcggagtcataaaactcagcgtattcgtcacggtatttactcttgtctgaaaaatagctttttccttgaccgttgcgagctgacgcatgaatagtgctctccatttttccccggtacgctcttcaatcccaagtgatttgatggtcgagatgccttccaacacttccgtcatgaatgatccagccaaactttgggcaacaatttgggtctgtgtcagtttcttgaatctgctacgtgtgtatacaaaaacaagaatttgaaccagtccaacaccaagcagtgtaaaagcgatcaaacgggactggattacaatatacgtgaaggtcacaacaattaaaaatagattgattagcgtagagatcatcttctgggataatatctctcgaatggtcgtattgctattaatccgcagcatcaaatccccgcgcgaacgaatttcaaaatattgataaggcagtttgagcatatgagagacaaagtttgtcgtcagttgggaatccagcaattcctgaagccgtacgatgcacatatccttcatataactgaaaccgatctgaaatagggttaacagcacaatgctggtgatcaggacaggaaataacgagtagccctcaccgctagtggccgcatcaatcgaaacctgcatcaagaacggaaaggccaccgaaaccaattgcagccccagagcaagtagaacggtccaaccaaaatattttttgttactgcgaatcaaatccttgaagtacgccactttactaatctttttctcggacaagggtacaaagccctcatccggatatacgagcaaaaaaatacctgaatatttctccgcaaactcctgcgtactgataaccagccttcccaaagccggatcaacaataatgaagtgcccactcgtcttgatccgctcaagcacgacaaaatgattgtcctcccagaaacaaatgactggcagaaaatcattgttaagtgattcaacaggcgcttttttggctatccctttcaagtgataggtctgagcaacctctttcattttgagcatggagctaccatccctgccgtttcccagcattgcaaaacgttccctcagatcggtgaaatcagcttcatagccatgatatgcgagtaacatgtgcaagcaactgggaccacaatcatattgattcatttgcagtttgacagggattttgcgttgtctcttccggcgcagacggaatacaggccgttcaggcatgatgctgccccatatgggatgactgctccatagtagtcatctgctgctgagcggacgccgtttccatagcgtatgtctgagccatatcccttatccccttgccctttggtccttccatcatcagtactgaaggcaggtcacgattgtacagtcggagcaattgatatccaattccggcaagccctagcatcagtcctgggatttgctgacgacccggaatgccgcatctccaatgatggttatcacgtctcacctgtgtcacaatgtaatttgccatctgaaccgagaactccttcaactcttcatcctgcaagtaatcggctgcgagaaggaacagctccagattgcccatatccccatggcagagcgaatagctaacttctgtaaacccttcttccatcgtcttggctaacgccctgcggatatctgtctctatcgtatccatagctcccaatgacctcaattgctgcgctatccctacgcgggcgatccctagacctggtgcgccattacaccagtacataacatagtgttcttccggcatgttgccatcggtgaaccgcagatctttccaattgtttacttcagggctgtagagggcttcctcatacttcagtccttccatacaagtttcaagataggctttgttgcctgtagcactgtatagacgagccagactcagacagatacctgcgttgccatgtgcaataccgctaagtggcgttttattgatcgctgacgtcacccaagctataccttgatccatcggctgggcaagatccagcaatcggtctgcgcatcgcacagccacatccagcgctttttgcgattggaagctcgtatacatgtccacacatgccatcaatgtgcccgcacaacctgagatcacatccaattgctgatcactattaatcatatcgtccaagatatcgagtaattccagcgtatccgggttgatccccggctcggaacatacgttagctttatgcaccagcagatagagaagcgacccgtagccagtgaagaatgagatgtttttgtcgatgtttttgcgaatcatttcccaggcagtctgaatgcacagattaaccatctgcatatatttgtggtcacctgtctcctgactcagatacagatagaaataggcaataccggttaccccgttatataaccccaactcggaagatttgtagatcagcttctcgtctgcatccatacccatactgatccatgacaccgaaagaccttcatctcccataatagcaatatcttttatgtactccccaatcctcacggcttcttgcaaatattcttctttggtcatgtgtatttgatgttcattcaatatttccggtcggacgctttccgtgcttttctccatggcgaatgagcgttccaggacatatttagtctggattgtacgctcggtaaactcccattgcatatccatgtctttgggattcatcgcccgcactttatccgcggtctgcgttaaaatatcggaggaaaacacgccgtcaatcgcttggttgtcgtagtggtggaacaacatttgctcaccgataaacgtctggaacatgggtacatcgccgtgcaatagatcatggcactcatatctcaccagtttttcacgatcacgatcctgccgcacaatcatccacatcatgtcgaacaacagattcttatccaacccgtctctgagatatttcggatgggaactggcttcaatcagcgtaaaatacgtaacggtcggacgaacaatggtacgtacagcacaaccatggaagtcattgcggactgttgagataaatgactccttttgctccataatagcactgtatatgcgatagaaaccctccttcaaactttggatatatcgctcaggtttaatgggtgtatgttcatatgaaggcaaatgactaaatcgactcacactcaccttgcttcgttggattctcatggtatcggtgtttttatcatgaatctcatacgtattgagtacctgatccacatcccctgcaagtccgctcagatcactgtgatacaaagcgttggaatccaacgttggtaacatgctcgtttttaacacggaatcattcaatatcgaaagggtcttctccagcgctgtatagtgtgccttctcctcctcatatttgaaaggttgattatgcaacagtgattccagatcgacgaagaagggatgctcgccctgagcaacaatgttctccatatgcatgtctgttgcattaacggcatacaaaatagcgagatactgcccctgccgttcaaaaaagcgttccgctccctccagactggtgacttcctcatagggaatgaattgctgccagccatattcggcgcgatctagcgatttggcaatacggaagggtaatcctattcgctgatcgttaaaccattgcaacagactggcaaaagcggtgtcgatggccatgttcctaggtttgtacatgacattgaccccttcggcaaatgccaaccgcaatacactagctccaccgttatgggaatccccaagaaatacgatatcctccagcttatccagcttgaaatcaaaaaaagattccagttcacgacgatctcttgtcagccgctccagaacacgcatcatattcagactgatccgaagagtgtgctcgacaagtcctcgtgcaagaacaggatattccagtagtaaggagagaatctgatctctggactgcatgttctggttcacaaagtgtagataccgctgccgggaatcctcacctctcaattcatcttgcaatctcgctttatttaattcatagattagtgtcttggcagacatgtggaacactttatccgagacggtcttcagaacaagcccagtaacacgtcgtttgtccagccattcatatccatcattcaagccgtccgtcatgatctgaatggatcgttgcaggaagggtctagaaaactcaaagaacgggatttcttccgtattcccctcaataaaatattcgatctccaaatgctcattctccagaaatgtgctgcagagttcctgatgccagggcatctgcacaaagtcgtacatgaagcctgtatcgtaaaacatagcctgcaccgtctccatattcatggattcagcccggaagcgattggacaatagctcctggtcctgaaaaaacttgtcaagccattgctgcattcttcctgaatccgtttgctctacaggcatgtccacattcggaacgtcgggaacttgtgcagtatatcgctgcacaaactgtttgtatttctctgttaagtagagtgcatcactccagcgggagtcatgtaatcgctcctgtatgctcatcatttcattccccttctattggatggtttggtgtccaaaatctcacataaaaaaatcaagcacataactgaaatcagctatgtgcttgaagatgagagtaaaatttaacaacaagtaagccaggaagaaggtgaaaccgaattataatgacattcatgacttaccgtacaaaatacaccgccactagcttgagcatcaattacagatacagcccctgtaatgaccataagctcgtcatcactgatgtcctcgattgctcgcaatgcttcgagattgaattgtttcattgaaaaaacctccattcgaatttttttatatgtatagcttataaaaagctaaacaccaatgttgaactcaactgcaggatattgtaaaatatttaaattatgtaattattttctatatattcattctagcataatttgctagtttttgtaaatccattttcgggattttaccaccatttgacaaaataaatcgcatttactagaatcacaacaaaattgtgttatttcgttgttaaatgcacaaatttttaaacacctgtccaagacaggtgtttttctaagtagcaggcaactgcaaagcagctctaagcccttccccgctatcactctcaagaataagctttccccgatgagcctgcgcaatccttgataccattggaagccccaagccatgtccctgacgggaaggccgtacgcgccctgccgcataggggagaaccaccacatcgtccagatactcttttggaattccttttccatcatctgacaccacaaattcacaacatacatcctcagctgcacgcatcgtttccagcacaattgcacacccctccgggttatgcgtgatactattttgtaccaaattcgttactgcacgatacaataatcgttcatcccccataacatgaagactctcgtcctgaacatgaagcgagattggataacgctcatccagtccattattcaaaaaatccgacacagcctgccttgctagtactgagagtcgaatcgacttcaactgtagaggctgcatctcatactccagcatggataccaggtttagatcactgaccagtgaccgcaggcgttcaccctggcgacgaataatggatgcctgctgtttgtgctcggctgacaaatccgattgctcctccaactcactcgcgtaacccagaatcatggacaagggtgtccgtatatcatgagaaatgcctgcgatccagttggatcgagcttcatctctcgcttttagagcatcatccttgtcctgaagcatacgggatgttgaattgatgctttgagacagatcattaaatatacccttggtctcgacatgaacaggctcttcctttgccagcgcatgaatgccattgatcaacggtcgaatactacggattacccgtgttccaattaatacggagaccagaagagcaagagccacattacacaccaataataggatgatccgaacaggtaatgacttaagccactctgccaaaaagtcgaactggtattttccgtacgtattcttggggtagcctacgaccaataatccgtctttacgctcccacacatacaccgggtattccataagataatatcgggagaacttcgcaacatccgtcacgttataagagcgcgggatttcagccggaagctgttcgctccactgtaccttgccctggggatcaagcagcatagcccaagcctgatatgtatccagcaattgcattccatcgctgtccagcgcatattccccctgctctcccttgctcaggccactagccatctgcttcacaaccgcaccaggggaaggcccttcatgaatttccttgaagatcagcgaacctagcagaatcagattgaatagtaatagcaccacagataccagaatggttgatccgacgaaccttcttaaaattcgaacaacgccatccattacctagactcctgaaccatcaatttataaccaagtccccgtaccgtcagcagaaatatcggtttggatggatcttcctcaatcttctcccggattcgccgaacatgcaccatcagggtattctcatacccataactctcgtctccccagacggcttgacacagggcatcactggttacaattcggccctgattctcatacaacttgatcagtatggcatgctccttagctgtcaatggaagctccctgtctgtcctctgtacaacagcgctctccagatcaatggtttgtccacccaaacgaaatacaggcaatctctccactgtgttggaagcatatacccgcttcagaatagccataagccggagaatcaactctcttggcagaaagggcttgaccatataatcatctgctccaagccccagaccgagcagtcgatcctcatcttcaccacgtgcagacaggaacagaacaggcatgtccgagaatgaccggatcgaagagagcaaagagaacccatctccatccggaagcatcacatccagaatagctgcatccggcttttcaagtctgcataccgccaaagcattcacgaagttaccagccgtatagatccggaaaaaaccttctttccgtaaaaaacgttcaatcatttcccgtatttcgggctcatcatctacgatcaatattttcttattcttcaataattccattgatatcaccctttttattatacatcataaaggcattcatcctatattttccatttccatttaaggtaattgtaaggttatcttcagctacgagcaagaagcctgatctatatttagagcaacagagacattagtgaaatggagttgagatcaatgataaacagttcccccatcgtggaaacgcataacctgtccaaatcttatggcggtactaaccgcgtacatcaggtcaatctggcagttgagacgggacagatttttggcttcctgggtcctaacggagcaggcaaaacaaccacattaaaaatgctgttgggtttgatcaaacctaccgaaggcactgtaaaggtgttcggcaaagatctgaataaacatcgcccttccattctgaatcagacaggttcactgatcgaatctccatcttattacggccacttgactggacttgagaatatgaaagtcatgcagcgactacggaacgtaccgaacaaaaatattgatgaagctctcaaaattgttcgacttgaaaatcaaaaacataaacaggccgatcagtattcgctggggatgaagcaaagactcggtattgccatggccctgcttgccttcccaagcctgcttattctggatgaacctacgaacggacttgatccgtccgggatcggtgagatcagggaattgatcaagtcccttcctggtcaatacggcataacagtcctgctatccagccacctgttatcagagatcgaacagattgctacctcagtcggcattatcagtgatggcaaacttctgtttcagggaagcatgcagagtcttcaggccaataacaaggctaccatacgttttcagacgacggatacggcaagggcggaaaaaatccttttgactcaaggctacatgcctacagtccagggcaaacaactggtgttcgactaccttcgtgacgaagaagtctcgcagatgaataaagtgctggtacaacacgatattcctgtgattcgtatcgaggaatacaagaaaagtctggaaggtatattcctggatctgaccggaaaggagcggagcctgtaatgaaagctctatccctagagtattttaaaatccgccgcaaaaagatctgggtcatgctatctctttttctggccgctgagatgatctgggcctccatgtccatgagtatctccatctcccgaagtgcaaccaatgcgagctgggaagccttgatcttcagcatcgcttccatgaacggtctgtttctgcccattatatcggctatcgttgtatcccgcatctgtgatatggagcataaggggaacacctggaagatgctaatgacgaccaacactggacgtaatcatgtctacacagccaaatacatatgtgcgaacagcctgatcctttatggtatccttgcgcaagctgtgttcattgtcggtttcggtttatccaaaaatatttccggtccgttgccactttccctgcttgtgcagttcgctataggcacaatgctaactacactcgccatcaccgctcttcagcaatggttgtctcttacagtacgcaatcaggcttttgcgttatgtctgggtatgctgggcggattcatcggaacaacatcggggttgtttccagcaggtgtacgtcaccttttcatctggtcttactacatggatctgaatccagtcacttatatttacagcgcatcttcgggtacctatgtatcgggtatgctgcctgtcggtcttttcttagccgccttgttgatggctgccatcttctattttgcagggaatattcatgcttcaagacaagagatttgaggaggggaacacatgctgaggagcatttccgcagaatggcttaaacttcggcattcccggatcagcctggtactggccattctgcctattatcagtctgcttatcggatgctttaacttttatttcaatcaagcggctttacaaaacgggtggtacagcctgtggacacaggtcagtttgttttacggagaattcttcctgcccatcctgatcgctatctgttgtgcctttgtatgccgcctggaacacagcaatcgcaactggaatatgattctggcttctccagtgtcagtcaccagcctatttgttgccaagttggtcattgttggcatattgatcttctcggctcaagccttcttcatgctcatgtactgggcagcaggcaaactgttcgtcattccgggtccgttcccgatggagaccgtcgtatggagcctgcgaggatggtttgccgctatctctattgctgcactgcaactagggttgtcgatccggataagaagctttgcgacgccaattggcatcagcctttgtgcagtctttctgggactaggcatgtatgtgctgaaaatcggcatgttattcccctactccttgttaactataggcatgggcgttctgagtcaaaagggactgacatcctcggagaatatcgtctttcttttcatgaacagtctctttatccttctgtttgctacctggtcgatccgccgcctgaaatataaagacatcgcatcgtcctaaatttaccgagatcaaaggaggacaagaacatgaaaaaagcattcactattctcgcattggtactcgttattctgacttgcctgtggctcttcttcatggaccctgctaaattgactcccgataaccctgccggcaaaacaacctactataccactgtgaatcagactacagtcaacaaggatgacaatggcagatatgcttatgaactgatcggctatacagacgaaggaaaatcaaaaacactaagcttctccaccagtaagctactcaaaaatggggcctatctgaaactatatgtatccacgctgcgtggtgttacacactgggaagaggtcacagcggacgatctgccggggcaagccaagcagttaacctctaaatagaaaaaagatgcgtatctatatctccattgatatttgcataacaaaaagagccttgccccattacttcaagggtggctcttttaggttatgccagtgccatctgcagcgcagtcagggcaatcccgataacaaatccggtaacggctccgttgatccgaatccattgcagatcctgtccaaccttatcctcaatcatcgaaaccaaagtggcattgtccattttatccacattttcgcgtaccagtttaccgattttggaatgatttttctccagcagtgttgtgacaccatttacgatcttggcattcatgcctgtcatcaacgcgtcatctgcccgcagatcaaccaatacccgctcaatggcaggcagtgcatacgtatctacatactgtccatcttccatcgcggcgagcgccttgtctctcaggtcggtgagtttgttcagcaccgtttcctctgcgttccagccctcaagcatattgttcttccagctgttgattccatcttgcatagcctcgctcattgccagacgcaccgtctgggtacgtaccatatcaagaaccttataccttagagcgctaccttcacgtttcatatcctctacccgatcgaagagatatccttgcaaaatgccacccagacgctcctcgttcatataacccaggaacgcattcatcgcaaactgcatcaatccgttcatctgaatgccgctgatggccttcatgccgctttcacccaaaaacatgatcgtctcgggtttaacgagccactcctcggcttgcttcagtccgtagtccagcgctttggcgtcgtaaccccgctctgtcatctgatgggcagcccgttccagaatcggacccagatcaaaagcgcccgcttgtgacttgatctcacgtgctacgagcggagcaatctgctctaacggcagaccagccagaattcgtttacagagcgtatcaatcatgatcttgatcccgtcactgtgaagctcacgtgtcaacgtatcgagcaccgtctctgctgctttgaaatctacaattttctcggtaatgctgtctttgttgagcaagttattctctactgcggagaccagaccttccgtcattttatcgcgatttttcggcagcaatgccgtgtgtggaattggaatgccgagcgggtgacggaataatgcagtaactgcgaaccagtccgcaagtccacccacgagtcccgcttcaaatgatcctaccagcaacttgccaactggaacgccctggaacggcaaggatgcagcaaatcctgctcccattaccacgagagaccaggcagctgcttttttggtttgtttaggtttagccattgtattcttgctcctttatcgttaatcgtacggtccgatctgtacccgattccgcacttcttcgtttcttatgtaaattctccatagcaaagtctcgacttccatgtttcgtatacttcatcttatcacccacaagcgtcaaaaccaaacctctggttgaagaaaaaggataatagcggcgtttacttcgtaaaatggatcgctcccttttccaagatcaggcagattttagtataatcaatcaagacggcccttcgatatcgattggctgctgaacagcagggtaattacatagtggaacaatgaatcaataagaggaggaatttcggaccatgaaacacgtgcaggacacaaccacactctataacggagtcaaaatgccatggctgggttttggggtattcaaagttaaagacggagacgaagtcgttcatgctgtcaaaacagccattcaagctggttatcgtagcatcgacacagccaaagcgtataacaacgaaacaggtgtcgctcagggtattcgtgaatctggagtagctcgtgaggatctgttcattaccactaaagtatggaatagtgatcagggatatgaatccacgctggctgccttcgaagcaagcatggaacgactcgaactggagtacctggatctctatcttatccactggccagtcaaaggcaagtacaaagatacatggcgagcgctggagaaactccataaagaaggacgcatccgcgcgatcggtgtgagcaacttccagattcaccatctggaagacttgatgatcgatgccacgatcaaaccagcagttaatcaggtggagcttcacccactattgattcagtcagagcttcgtgagtactgcaacaaacatcagattcagatcgaggcctggtctccgctcggacaaggtcatctgatggatcatccgttactgaaggatatcgccgccaaatacagcaagtcccccgcacaagtaattctgcgctgggatctgcagaacggcatcgtgaccataccgaaatccgttacgcctgagcgtattcacgcgaatgctgatctctatgattttgagttaacttcggaagaaatagagcagattaacagtctgaacgagaataaacgatttggttctgatccagacaactttaacttctaatataagcaaattaattcgattacacccgccttcgatcttagaagagcgggtgttttggtatgtgatgttataggcaaactattcgttgttaagaatggaggcgaggctcgttatcctattcagggccgaaagaaaaaaaattcttgaccgtttagaactatttcttctcctcaccagtctaacgagtgtcaaacgaactcaagcacttatataggatccaggcatggaacgagcggtgacttgaatatttaggttgatcaggggggatcaggagtgattagactgaaccataaaaagacaaaagaagaacagttcagcgaaaaaatatcagagattcaaaataaattatatcgactggcatactgctatgttaaaaatgaacaagaagcgctggatatcgtatccgaagcggtctataaagggtacatcgcgtatgggaagatggagtccatgacgtattttgattcctggatgtcacgaattgtgattaacacagcgatagatcatattcgacgcaaccagcgagtgacctatatggaggatcatgtgcaggagtttgtagctccagagcgaggggcgtcgctagaagaaaaaatggatctatatgacgcactggatagactcgtgcccgaagatagagcctatattatattaaagttctttggtaatatgcgtttccgggagatcgctgaagtgctctccctgtcggagaataccgttaaatcaaaattctatcggattatcaacaaattaaaaatggatttaattgaaggagaggttgagaacgtatgacaggaaaagatcgttacgaagatattgaaatccctgctcaacttactgacgttattcatcatgcacagaaaagagccactgctcgcaagaattcatctcgaatgattcattatgcttcagtcatagcggcatgtgctgcttttctcttcgtggtgaacatcccttccgtagcaaacgccatgtccaaaatacctgtggtcggctctattgttcaggtattgcaattcggcgatggcggcaaagttacagatggtgtaactgtgggatcggaagcaaccgaaaatacgcttaaaatcaattttagcaccgacgagcaagatcagactaatgatgcacccctttataatgtagtacacaaagaagcacctaatcgtatcctcttcacttttagcggtgcacgttacatggatatagagaaagtcaaagccgacttcatgacccagcctttagtgaaagatgtttatggttccatgattttagacgactcttccgtcggattcgtagttgttttaaaagaaggggtacagtatgccgtaacggaattcaagaaccctggatacctggaagtgaaattgacttccgacggcaaaccggtcacacctcggaaggtatactctctccgcacagaatcaatgccttttggagaatcgatgggtataattaaagaatcctatccggatgaggacatctctttcctcaaaacgtccactggtgagtttacagcagttattggagaatatcttaccgctgaagaagctgaacagaagctcaaagaactcgctcagcaaccggattatcatgaggagttttatgtggacagctggatgagtaacgagaatccgaagtgattagtcattgccaaaagtgatgcttattcaaaagggaatgatctatccctgaactaggcatagagctcagcatactttatacgctcaatccaaaaaaatcccgattcggatgccctgagcatctcggatcgggattttcacatatcaaaacctattcgcttttggataccagcttgaaatcatcaaagtggaaacctggcgctactacgcaagttaccagtacaggctcatcgcccagcggacgcgctgtctgccatacgccggcaggaacgagcacctgtggtgattgccccgcagcaatatccatccccagaacaagaacttcctcgttctccgggttctccccattgccgcccagcttcagttcaactggactgccgctgtgccacagccaaagttcatcggacagaaccgtatgccactcggagatttcatgtgcatgtagcaggaaatatgtggaacttgccgagaatcgtgggccggagtatgtatccggcagaacggactgaggaatctgataagatgccttccattcttccttataccaaccgccttcaacgtgaggttgcatattgagcgcagcaaccaatggcgataattcatgtgtcgtcataacctgtttccttccttccaaatcatattggagacactccttaaccagagtttcgcctctctccccctactctaaaacatcattcaagttttgtcaccttgacagcacataagtgccatgccggatctgtctctcggtatttaacgataggattaaagaaatatttcatttccaatgatagcgtttacaaaaagatggatgttccgttatgatatggatatcgttgttaatccgtgaagcagaggggagctgtaccatgagtctcatagaggaccggattggacccaaataccgaatcggtgaacattcatttaccattgaacatatgcgcagacatgatgggaatggtatgccacaacctcacgctcatccattctacgaactgtattacttacttgaaggtgaacgagtgtattccatgaatggtcagattctgtccgcccgcaagggtgatttcattctgattaatccacacgatgtacataccacctccaaaggaagtattcccggcttcgaacggatattaatcggtttttcgcctgcttttgcaacggggatggaacttggcatatgtggtctgctcccttttaattgttcaagactccttcgcctgcctgaagcggaacagcccgagatggagcgtatattgtggcagatgctgcaagaatgcaaagagcgacgccctcactatgagatcgccgtaagaagtctgcttgcccaacttttgatccgtattcatcgggtagaggaggacatccggcagtcatgccccggtcccttgcatccgatgcaggacaaaatcagtgaaattgtcacttatgtgaataaaaactataccgaaccacttacgctggagggtgcagccaatcgtttttatatcagtccatcctatctgagccgaatgttcagccggtttaccgggtttcgatttagcgaatatttgcgggttgttcgtgtccgggaagcacaacgaagattgctgtccacacaagagcgtgtccagatgatcgctgagaaggtaggatttgaacatacggctcattttaacaaaacattcaaacaggttaccggtacaacaccgctgcgctatcgtaaggaacaccggtagatcatcagataacttcatataaaagccgagtgggtagcctcgctccagagattacgcattccttatatcaaaaggcatcacgattactggatcatggctgcaccactacggctgaattggaccaaattgtataaccctactacatactttttatctgcgaatgatcacaccacttcgtacctcgggacccacagagatctgacgaccgtctgtgtctgcatcgccttcacgacatacaatgcctgcggactcgtgtccggtcaccatcagaagtcggccatccgcacctttgcccttaatgctctctaattctgcccctttgcactggtgcaaatgaaccaacggaccttcggtgatctgcgcttgcaattcagcgatatgcagatgtttcgcatgagcacattggataccactgcgagcttgcacattgtaacgctggatgatcaccccatccaaaggctgttccggcaatccactcacaagcaacgcagtgtcggcacccgcacagaccacatccgatattcgaatatcccggaacactggcgtctcttcgctaatctcctgagatagatcactgccccgagcagacccttcctgatttgcatagaaaaaggaaaacgagatggcctccataatgatatctttcatatatatacgctcaatctgaatgtcctcaaccactccgccgcgcccacgtgcgcttttgaagcgaagtccaatgtccgttccgataaacgtacaatccgacacacgcacatgccgcacaccgccggacatttcactgccaatcacaaacccgccatgaccgtgatacaccgtgcaatcccgaatggtgatgtactccgatggaagacccagttcacgaccttcggcatccttacctgatttcagacagatcgcatcatcaccgacatcgaatacactcttctcgaccaccacatgacggcaggattcaacgtccagcccatctccattctgagaaaaccacggattccgcacactcacgttacgaatggtgacatgctcagatgcccaggggtgcagattccatgcaggcgagttctgaaacgttggaccgtccagcagtacccgtttgcatctccgtaaactgaccatgttgggacgtaaaaagtctctgacttcttcataggcaacgacatcacgcacctgctcctgatgcaatcgattcgcgatggtgccgccctcaagtgcagctgtggtaggccaccagatttcttcatctccaccggattgctctacaacaccaccagaagcgaccaattggttccattgtgaagtggtcattttagagcgttttactggacgccatgcctccccgcccccatcccatatcccctcaccagtaatcgcaatatcctccagttgatcaccatcgatcggggattggcaacgtaccacctgccagccttcgaagcttgatgcaattaatgggtattgatcaaaatctcggctaaacgtaaccagtgccccttcttccacatgtagttcgatccggctgcgcattacaatcggacctgtgagccataccccggcaggaattacgattctcccacctcctgcttcagcacatgaagcgatggcaagtcggaacatctccgtattatctgttacgccgtctccaacagctccatagtctgtaagctgaaaatcctgagcagggatgacgggcaacttagcttcataagctcgaacatcggactgggcacttgctcctgtcgacattggggagtgatatgtattcatcgtgcagaatcatcctctctacatgtaatggaattgttatgggatcaatacatcgcttttacttcccttacttacgttcaaacggacgctctctcgctccatcatatcaatggcatgacgtgtagggttgagctttcttgccatgtacacgtggaacttgatgctatttgttttgttaatcagagtcataaatcaaacatcactttcagtatactctatacaactattccaaaggttggaaagcaactaggagaatagattcatttttctgtcaggattcgtcacaaggcatttaataacttgacagatatataacatattttctggctatagccctagggaacccattacttatgtcatgttttatcacaaaccaattgccataagcaggatgactatgtatgattaaataactagtttcaatttattccttattattccttttacacacagacgttgcagaaaggatggggtgtactcttgattgaatttaggggtgtccagaaacatttcggtcattttcatgtcctcaaggatatccatcttcacattgaagaaggagaagtcgtcgtcattatcggaccttccggctccggcaaaagcacgttactccgctgtattaaccgcctggagaccattaccgaaggtgaacttgtcgtcagtgggattcctctacatcagaaaaaggtggacattaacctcttccgccgtgacatcggcatggtatttcaacacttcaatctttatcctcacaaaaaagtcatcgataacattacccttgcacccatgaaggtgcgcaaacaacccaaagaacaggcagccgcaacagcaatgaagtatctgacccgggtgggcattgccgacaaagcagacagttatccctcccagttgtccggtggacagcagcaacgggtagccatcgccagaggactcgccatggagcccaaaatcatgctttttgacgaacctacctctgctctcgatcccgagatgatcggggaagtcctcgatgttatgcgttcccttgcccataatggcatgaccatggtcgtcgttacccatgagatgggattcgcccgtgaagttgcagaccgggtcatcttcatggacgaaggccgaattgtagaagaggccaacgctgctgaattttttgacaaccccagagaagaacgagcacagcaattcctgagccgtctgattcatcattgagaataatccactattccattttgaaaggggtctttattcatgaagaaattattgaaatggccatcatttatgcttgtcctcattctctcccttgtattgtcaggttgtagcacagatacagatacaccttcagcgagcggtggtggcgatgccgaggcgaaaggcacgattgagcggattaaggaacgcggcaagctcatcgccggtgtgaaatacgatacgaagctgtttggcttgaaagatcccgcaagtggcaacgttgaaggattcgatattgatatcgccaaagcactcgccaaacaaatccttggagatgagaccaaggtcgaactgaaagaggtcacttccaagacacgtattcccatgctgcaaaatggagacatcgacatcatcattgccacaatgacaattacggatgagcgtaaggaacaggtagatttcagtgatgtttattttgaggcaggccaatccctgctggtgaaaaacgacagtgcgattaccggcctggaaagcctcagcggggtaaaagtactcgcggtgaaaggctccacatccgctcagaatattcgcgagaaagccccggatgctgaggtgcttgaattcgataactatcaggatgcattcactgctctcaaagcaggtaaaggcgaagcgctgaccacagataacatcatcctcatcggtatgcaacagacggataacagcttccaattggttggtggcaatttcacaagcgaaccttatggtatggccattcgcaaaggtgacactgccttcgtggaggaagtcaacgcgctgctcaaaagcatgaaagacagtggggaatatgacactttacatgagaaatggctgggcgcgaagcccgagtaacccgaattaagataggtaagcggcgaattcgtctgctggatgcgaagcatgagcagacgtaatcgccgtttctacatctggagaacggaggcttcgcctatatgggcacattggatttcagcgtactaatgcgacactcggatcgttttctggaaggattcctgaatacgattcaagtgagcattatggctctcattggcagctttatccttggcgcgatcctggctatctttcggatatcccctgtgaaaccgctgaactggatcggcacggcttttgtggaatttatccgaaacatcccattgttgctggttgtgtttttcttctatcttggactgcctgcactaggcatctcgctggatggatttgtctccggtactctgggtttgaccatctacaccgccgctttcattgccgaagcaatccgagcgggcattcagaccgtgccgcgtggacaactggaagcagcaaggtcttcaggtttgtcctatgtacaggccatgaacctgatcattctgccccaggccatcaagattgtactgccgtccatcggcaaccagttcatcaatttggtcaaaaactcatccattcttgccgttgtcgctggtatggatcttatgtattttgccgacctggttaactcggatacgttccaaccgctaagtgtgtacaccattgttgcgctgttctatctggtgctgacactaccactcagcttcctggtgcattatatggagcgcaggtttggacagagcgatgcagaagcgcgcagcaccaaaggcaaaccgaaaaagaacaaaccggcaggtcaggttaccatgtaacagattgacttgtacctgcgcagatttttagggaaatatattggcttgtctatgccccatctattgatcttcgatattccagtcctgcatacagaaggaggctaataaaatatggactttagcggggcctatgcgtggcccaaccttcgtttcctgcttcatggattcctgattaccctgcaggtagcagggctatccattatattcagctttgtgcttggcactgtgctgggtacgatccggtttacccgtatccctgttctgtcacagatcgtcgcagtgatcgtggatacgatccggaatctgccgctgttgctcatcattttcttcatccacatggtacttccacagctcgggattaaaatgtccgtcttctggtccacagttgttggactgagtctgtttgaaggcgcgatgatcgccgagatcgtccgtagcggtctgaaatccgttgagcgcggtcaggtggaagctgcccgctcctcgggcctcagctacatgcagaccctcggtggcatcatcatgccacaggcgctacgccgcatgtccccgccgatggtcagccaattcatctcactcctgaaggatagttcactggcgatcatcatctctctgccggagctgatgcacaacgtgcagatccttggcggtcaaagtttcgattacattatcccggccctgctgctcgcagccgtattgtattttgtcatcaactacgcgttgtccattgtcgcaagacgacttgaggcacggatgaattgataatcagagagaataaggcatgaaagaaaaatgaaggaacaactaggaacatcaaggaaccgagaccccatgattgatcagatatgaagaaatgaacttgaaggaaagaacctaatagatgaaaagaatgagaacgccccaaaaactctaaattcacctatgctatgcagtggatttggagtctttggggctacagttatgctcatcaattcacgagcttcccaccaatttctaacgaactgtaggaagcttatttagctattttggggatagtttctaatctaacgaatcgtagacgctctattcttccgattcaccccgcttttaccccctattacagggttttgagtaaaataacttcactgagattcgttacatttttcatttcagcttatattcccgaattagacgcctcaggttcgttagaacgtacgccaccgcgaattaaataaacacccactcccactattaatgattcacccgattcgcccaattcgtccacaatcagctcatccgctagatcgctgctccgttgtgacgtaattccgcctgtaacagctcgatcggaagttccaccgggtccagcatcatcttcactgttagtgcagccgctgtccctgccgcctccccggtagccatacagcttggagtcaatcttgtcgttgcatgcgcctcatgtgtggtggagatgcaacgtcctgccgccagcagattgcggatattgcgagagatcagacagcgatacggaatatcgtacgccccatccccctctataaaggcagccacaacaccttgacccgaagggtcatgaatatcaatcggataaccgcttctggcaatcacatcgtcaaatttccgtcctgcaactacatccgcttgtgtcaatgcatactgcccaataattcgcctggattcacggataccaatctgcggtgctactgccgagatcgaagcccgttcgaatccaggcacatcacgctgcaaaaactcagcaatcatcagcacctgcttccggccttcctgttccgcagaagtcagatcctcggcatctgtcgcatcaagtccctgcacccgcgtacaattaatcagcacttcatcctctgccggtcccgtaaaaaacaacacctggtcgcgattaatcggcacacctgcttttttccactgggaatagaaaccactcaccccggttaacggaatgctgtccagttcagcaaaaggagttttcacatagaaatcctccgggtgctccagcatgtattgtttcactcgtccaagatccacaccacgcatgcggaatttcatggtcatcggctgtgactgatggtctccgtctcgtccctttgccacagaagcacccgcaagataagccagatccgcatcaccgcttgcatccacaaatacattcgcctggaattccattcttccagatttgttggtcacttgcaccgcttccacccgatcctctacaatgaccacctcgtccacaaagctgtgcaataacagccggacaccagcctcctgcaacatctctgctgcaaccacctgaaagatggctggatggtacggcgtgacggtgtgcacaaatccaaccgtatcgcgcagatgccctggggagccgccacgtgcctgcaaacgatccacaatctcctgcgcaatacctttaatgacctgctcaccgcgctctgtgtggaaagtcatccaaggataaaccatagcagcggttgacatcccgccaacgaatccatatcgctccaccagcactgttcgtatcccctgccgtccagccgcaatagctgccgctatacccgcagggccccctcccacaataacgacatctgcttcttcctttttcatgctcatccgttcacgcaaatgttgtccctccttccgttctattgcacgtattacaccgcttactctttcagtcccgtcatggcaaccccctcaatgaagcgccgctgtgccaggaaaaaaacaattaacagtggcaaggttgccatgacggtggcgctcatcagatattgccaggctgtacccacttcatctgtaaacaaggataatccaagcggcagcgtcattagatcacgcgagttaataaagatcaacggatcaaaaaactcattccagatcgtcacaaacgtaaagatcgtcagcgtagccatacccggcttggcaatgggcagcataattcgcgcatatatccggaatcggttgcaaccatcaatcatcgccgcttcttccagttccgttggcaccgtaatgaagaactgccgcatcacaaagatgccaaacacaccacccgcgccaaagatcggcaataatatcagcggaagatgagtatcaatccaccccagctgccgcatgaacagaaacatcggaatcgccgtcacctcatggggaatcatcatcgcactcagcaggatgagaaataccacattacgtcctttaaacggaattttggcgaatgcgtaaccggcgagggaagcaaaaaatactgttcctagcacaaccaacgcagaaatgtagatactgttccaataaaaacggtgaaacggaatcaatcgaaagacatcgatatagttctgaaatcggaaagtatccggtatccactgcggtggataggtgaatatgctctggggttccttgaatgatgtcgatatcatccaaataaatggcacaatcataatgagggaaatcagggtcagcaacaagtacgtccccagagtacttcctatcttcctccccgaaggactaggcatcgccttcattgaatacccacctctttcggagctgccattgtagcagcgtcagaattagcacgataaagaacagtacatatgcgagagcagaagcatagccaaactgaaataatttgaatgctttttcccagatataataaaccaataccttggtgctgttgctcggcccgccctgtgtcatcacatagatctgcccgaatactttgagtgaaccaatcacagtcatgactacggtcaaaaacacggttggtgtgatcatgggcagtgtgacgtgaaagaaagttcccctcttgcccgccccgtctaatgttgccgcttcgtacagcgaacgcggtacctgctgaatggctgctatgaacagcaccatgttcagacctacatttttcagcacacttgtcacgataaccgctggcattgccagatcctgattgtaaagccaagccggacccttgatgcccagcatcaacagaagctgattaatcaatccagactctgtcgcatacatcagcttccacacgatggcccatacgatcaacgaggtcatgaccggaacaaagatggcggttcggaaaattccgatgccccgcagatttctggatagcagcaacgcaagtagcaaggcgagcacaatattaagcggcaccagccccgctgtgaaataaaccgtattggcaagcactttccagaacatcgcgtctgtcatgatattccggtaattctccaatccaataaaatgatgatcccccagcagcggccaatcggtcagactcatgtataaagcgagacccatgggaaataacagcagcagggtaaacccaagcaccatgggcgatacaaacagccaacctgcgatctgggcctctctggcgagcggtccccctcttttgcgcttgtgtgaatgggtcaatcaggcctcccccttttaatccaatttcctccgaagctgaactctgcgacgattctatataaggtgaactatacatttacacaagaacgtagaggacagaaaaaacctgaagaagcgaagtggtcgcctttatccccggatttcccctttatatatgggattcaaaaaaaatctggggataacagcgatcggaaggttgttctggcatcggagtggcaagtgtaaatattctttagttcaacttatatagtccgaacggttcagactgtccaccgcattgcggaacccgttcacagcccttcgtagctgttcctctgtgttgcctgtcacgaccgccccaagcatgatcgcttttaccccggtatcgcgcagcacccgaacatcctccggcaccagctttcgctgggaaggaaccaataccggtatctgggcttgcaagaccagacggcgatacttaagcacatccgcgaagctgagcggtgtaccatattcttttccaagtacaatggatgcctccagagcggtgaagccgaagtgcgctgccgatgttacgagggaagcatcatattcttcattgatcgcaaacgttgggtccagccccaagtcattcaacatgaaagatggcaagtgatgtgcatagatggaatagaaatcaaaacccagcccggaaagcccctccacatcctctcgccttgctccatcaatactgccagaaggtacgacccctagcggaccaccaaactcactgcggatcgcccgaaacacctcggcgtacatgtccaatggaccaaaatgattcccgctggcgcgatgaccgacattataatgcaccttcagtgcatcagcgccctcttccatggctgcccgagccaaagcaatattattctcaggcaggctgaccaccagcgacagcggtttctgttcaagtaattctttgaatttgcccatcgttctcacctccggtttcgatcaaatgatttagggttgcagcacactttggatctcttcctgcatttgtttcaggttatcctcagctgtcgccgtccgggcaaacagtcggtcaaatccctgcaataccgcattgtcgatatcctgccaacggatatgaccgggaattaagcgcgcttttggcatttcatcaatgaccgcctgcacgatatgctctttgctcgggttattcggctgaagaatgaatgcatctgagttcagaacagaggtacgcggaggtacaaagtaggtggctgtcgcctgaatcccctgctcactggcaaaatacttcaacagtttcttcgtttcctctggatgtttgctgtcgttgaacatggcatatccggcctgccccagcatcggcacactgccttgagaaccggaaggcataggagcgatgctccattcaaaatccgtaatctcccttgctttggaaacatagctgtaattatcaaagaacatgcccacattacccgcatcaaagctgacctgttcgcccgccttcgggtgtgattcatcggtgaacatcatgcgttccagtaattcaaaggtctgtacgccataggcatcgttccaggtgaacgttgtcatgccttcgtcgaatggaccgcttccattggaccaggagtaggaggaaagcaccgcccaggtcttccagtcgcgaaaaaagttggcgccatagattcggttggtcgcatccttgctggtaatggctttggcggactcttcgaactgttcccatgtccattttccttgggtggcaagtgtgtttggatcagtcagaccggcctggtcaaacagcgttttattgtaaaacatgaccaccggaggtgtagagaaaggtagccctaacaattgatcgccatcacggaacaaatccaatgtacttggaatataatcatccagcttaaactgtgcatcatccttgaactcggatacatcggccagaatgtgattggacttgaattgtggtaccattcgctccgatacccaggcgagatcgggaagggagcctccggcggcaagcaccgaaattttttgctggtattctgcgaaaggtacggattccatcgttactttgatgcctggattttcctttgtgaagtcatcgatcaacttgttgtacacatccatatgcgcctgattgccccacatcatgaacttcagctcgacctcaccattctccccgcctgcactcccagattcactgttagaattggagcttgcgcacgcgattgaagccatcatcatgagtataaacaccagtatcagtcctgcttttttcatggaaatcccccttatggacgtcgtggtatacatgtgcaaccaaagtataacgaaagcatcgttcccccttaaatcacgtcaactacagaaatggtatggtttttcaagagatactgaatcggtctcgatattctcccgcagtccatcccacctgctgcttgaacaccaacatgaagtgtttggggctctgatgcccggataaccgtgccacatcatagattttgagacccgtgttgatcagcaaccacttggcccgctccatacgtgcctccgtgatgtattcggaataattgatgcctatttcattcttgaacaactggcttaaataagtagggttcaagttaacaagatctgccatcgtctgaagtcgcagatctccatcgggatgttgtttgatgtgctccttcacatctcggataatcttccgtgtatctccaccagcgtgttctgttttcccagatggctccgggatagaaagggttgaaataccgtatctgcgatccagcagcaattgaatcttttgtatgcataatgccagttcataacgatcgattggtttcaacagatagttcaatactccaaactccatcgctctgcgtgcatattcaaactcgccatagccgctaatgatgagcattagcaattcagggtacatgtctcttgctttgcttaccaaagttagtccgtccatttcacgcatgcggatatccgtgattaacacatccggcacctcacatctcagaaaatccagtgcctcggtaccgctcgatgcttcgcccgttacctgaaactgagaagacacttgtacgatcagctccctcagtccctgacggatgaccgtctcatcctctacaagcaatactttatacatgcgcttcaatcccctttcggtagaagttgaatggatatcgtgaccaccaggccctgcccgggacttccatcaatgcttaggctgccgccttctccatacatgaggcgaagcctctgagcgatattgttaagccccagactgtccccggcatggcaacgtaatgcctcattggaaggttgttttgatatggattcatttaactcgtcaatctttgtctgagtcatacccttaccgttgtctcgtacactaatcagcagctcatggtcgaatttcaaggcagatacccagattactcctccattttcctgcccttcaatgccatggtagactgcattttccaccagcggttgcagtaccagcttgggaatcaaatactccgttattgcttcttcgatgtcatagataatctctaacttgccgttgtaacggacctgctgaatgcgtacataggattgtacaaaagcaagttcctccccaagtgggaccatccggtccaccttatcaatcgtataacgcagcagcttgccaagcgccgtcaccatgtccgacacctcagcatgcttctggcgaatggccatcatgttaatggactccagcgtgttgtatataaaatggggattcatctggctttgcaacgcagacaactcggcctcccgctcttgaatgcccaacagaaacacctcattgaacagtcgatgaatctcttccatcattcggttaaatccccggctaatctgtccgaattcatcactgctgaagtgtgctacacgctggctaaaatctccctgttccacccgaatcatgtggtgcttcagtcgaatcagtggccgggtgatacgataggataacagaaccgccagaatcgctatacccgccatacataacactgcgaaccatattgtgaaggtgagcatctcacctgactccttttgaatcacggcaataggtgtaagactgatcaccgaaagcccagaatagctggaatggtgttgtacatagagatagggctgcccatccagaacaactttttggtttcctgcatagctttgaagctgtccctgcattagcaactggtcgtacgcagacattcctccggtcgaggtccgttcgaacagaagacgctgtttgctgtctacaatcatcagacttgcatcttgctcataattcagattggataacagttgaccgaaggcctccagacggatatcaatcagaatgtaacccaatcgttggagcgttcccggatctcgaagcactctgcccaccgatatatacgattcttgctgaccgcccgtgtaatagccggggtcatgcggaggaagcaggtgccatgtcccttccgagtcttcaagctctgcaaaccaatcatcctgcctgctgtcccataccggcttgaccgccaacgaatcgagattggagaacaaaatgccgctattgctgatcagatgaattccccgaatctcgggccggtcataagcttgacccgatgtgtaaagcttcattttcagataatcctcagacctcgcccatgttcccgaccccattgaagcgttgtatttgcctagaatgccaagcaccatctgatcgtaaagcggcaagagcgacaaccgctcaaagtccttcagcagccgattcagattggcgttaatctggcgaaccagttcaatggtgaactgctcggtcttgcgatccatcgtctgcgagaaatgcttgtagttcatcactccctgcaaacttaacggcagcaacgtcagcgccaggaacaacaggagcaacttggtgcgcaggtttacgttttttccgaaaaaaatgcgtaccttgtccatcatttccgttcatccctccctctcccgatcattgtatgagccctcttcacagatcaatctggatataactggggtcatcatatccagttttaatgatcattcgctatcctgccaatcctggaattggtacggaatttcaagttatccgcataggtttcagatgaacgcaaaaaaagccgactgtatcgctacagtcgactacgctatttctatagaacactaattagaccaaaaaaccgactgcattatgcaatcggttgtctgttcctgagatggcttttatatttgaatcgattatattcattaataagctcgtccagtaccatggactgtcgaaggacttggttgtcctgcatgccatgattctccgccaaacgacttaactcttgcctgttccgttcgattttatctttgatctgcctcggttcattcatagcatgcaccccctctttgtataacattttaggatacattgccaaaaaattcatattttattcctttgcagaataaaatgtttatttacaaaggttttcaaagaaattcaccctttttcatacttatatgttgaactacagattaaattgtaaataagaaaaaaagtattcggaacccgaatacttttccttatttatttcgtaatgaatttgctaaatacaacattaacatccctaaaaatatcaataatattccttcaattttatacgaccaaatctctgagtttatgaaactaccaaagatatcagacgtagcagacttaacattttggtattctgcaagaaccaacatagctttgtccataccccaatcagtactttgagcaataaactgaaatccaataacaaataatacaaatgaacagataagggctactaaggaaatcattttacttttcaaatttaaattctcctttgataatataatattggaaaggggaacttcaaaactcaatttaagtaaatatcatctcagtctatttcatgttacgtataatctcagcagatgctattttccacgtgatattattgcgagacatcctaaaaattagagcgcccgatttgatatccgtaatttgatttatgtcgtcataaataatgatctcgaaactggaaagcacttcctttgaatttgaattactatgagttcttttataagtgacactaggtctttggagattattaatagtatgataattcaggaattgattcacagaatcaggataggtgtaagacgtgctctcattcttaaaaaaatgggacagatcatgttctatcactcgctcgggtgatttgaatacatatactcctccaatccccccgattaaaatagccagtaaaagagccaatagatataataattaataaatattattttaagaaccaatgttttcaatataaaaaaggcttacatccaattctggagataagccttgctaatagtcgcccatttattgctatactcccccattaccatgagtgctaggactgtagattacaggcttactagagataggtatgggatacaagttaattaatataaagacactagacaagactatgatcaaagctactttttttctcataattactgtaaacctcctctataatagtcttatacttgttttttatttctattgaagccctgcctctatgtctttcgaatagaccaacacactgtatagtagtagattcgctctttatttttctagatagttgcaaacattttaataaattttgaaaacctattgtgtatctttctctctcaagttgatatattgttaattcttttaagaattgcatgtatcttccattggtaatctgttctgtataactccctatatcaccatatgtttcctcatacttggagatatagagatcaaatttatcaagcactgaatcaacatccatcttatgatgatttgatgcttccattattttcaacagtcctggtagtacctctgcctcatttttctcaataaagttaatatatgactgtatgacagcagaatcacccatcataagtctatataagtaatgattcacctcagcccacgcattaaacttattaatgaaaaagagttcttcatcactggggttctcaattttaattaatttagagtaaacctcggtatatcggagcgcttcaggatattcttgccgcccatcacatgcggctgcccttattaagttcgaatatgctgagtatacgacaagaggataagaggctattctctgaatttccgacttttttttcttgaaagactgtaaaaaaactatcttctgttcaagatcttctccaagttcaaataccttatcccagtattccagggatgagtatgtattcgccaggtcttttatcgcatccagttgccgttcctcatccagccgattaatatatggttcaaaatgtacggctgcacgaagattctcatgctggtcctgaccaagcgagagggtgaagatgcgatactggcacagagccagacgttccgagtgttgatatttctcacactccgccacacattcgtacaacatccgtgcagccttcgtctgtccacgttcaagcatgccttcggccatctcaaacaactcggagatatacgagcgatcatccgtcacttcctggataaccttatgaatacattccagcttgtccaattcagcacagcgttgcagaaatggttccagtctcctccaatgaggtgccgattccacgaaacattcagccccataaatctcgtagaagtacccctcttccagcttcatgccttgggtaatcagatccagttgcgccatagcgatgggccgagtccccttaataattgcgctaagcgtaccagcgttaactcccgatatatcggcaaaatactgcagggtgtacccctgtttcctgatgtagtcctcaatatatgagcgtatcgtagttgtaggttccatgtatcccacctccacaattaaaatccataattttgaatttatatgataagcacaattttaatcctaaattttacagcggtcaataaaaatcgtggcaatttccttcacatttatgcaaggaggcctcgctgttcctgcttatagaaaaaatccattagaagaatccgtgagaacgtgatacatttaatccaacttacatatcctactatttcaataggattatacgacacagatactatcaattcagttcgaggagaaggtcagatgaaatttgccttgtttagtctcatgatgaatctgcctaatgccataaccggggaagctctgacgactcagcagaaattccacaatatattagagcaagcaaagctggctgaacgactgggtttcgatgcctatggaatcggtgaacgacacggtgcgccttttctatcttcctcgccacctgtcgtattaaccgcaatagccgcagcaaccacacgcattcggttactaaccaccgtcactgtgcttagtatacttgatccagtccgggttgccgaggattatgccacgttggatcaattatcgggcggacggctggagatgatcatcgggaaaggcaatgaccctcggcactatccgctgttcggcataagcgaagaggaacaatgggactcactcgatgaacgttaccatctgctgaaacagctgtggtctgaagagaatgtaacctggcagggaacgtatcgccctccgcttgagggagtgaccacgtggccaaggccgcttcagcaatccatccccatctggcatggtagcgcgtcgagcacggtctcgaccgaactcgctgccaaatatggcgagccgctctttacgtcgaattcttttcacccccaagccaaatacaaagcgttaattgatcattatcgggagcgcctcgattattatggtcatgatccgcagcaagcagtgattggctctggtgccggcagtctctatcttgcggatacgggtgaagaagctattcgccgttataagccatattatgaagcgttccatgccaccgccgccgcacagcataaccaatctcccttcagcgatctggaagataacattgcacgaggtcctgcgttaatcggcagtccggagcaggtcattgagaaaattctggactaccatgccgcttacggacatcaggtgctgagtatcagcgtagatggactgacgcatagcgagcagctggagcaagtggagcgttttgccaaggaagttgcccctgtattacgccgcgaactgcccagctcggtatggaatgaacccccggtgttaacccagcactcatccttcctttcctctaatgttacagattcatggcccacagccatctcacctatattccaggtctaacaatctacctcgtacaatatacatgtgctccttccagggtgattcctacgaatcgccctcttccctcttcctcccacttctatcgtgactatccctatatctacttggactgaatgccttccaacaatgaacgaagcatcacatctacaaacgtatcatccatcgcttcacccgtcactaacatgcgataaaacaccggcccgtagatcagatcaatgtacagtccaatgtctatcccacttttcaattcgccgcgctccacacccttctccagaattccccgagcttcacgccgacgtggttggatatatcttgtgcggtattcttcggcaagcccttcatccgactgcccttctccaataatctgtgtaatcatcttaccttcccgactggtcaaaaaacgaaccagattactcgcatgtatgcgtatatcttccaataccgagcctgtatccggtactggcaatcttgccgttgccgcagacatatatccgtccatgatgactgcgcctttattcggccaccatttgtagatagtggctttgctcacctgtgcacgttcagcaatcttctcgattgtaaccgccccgaatccgtgctccaacaacaactcatacgatgctgtaagaatggcattctgggtttccatgttacgcggacgtcctcttttggcagtcatcttgagccctcctggatgtataaaatatatttaatcatcagtaattttcataaaaacgatacgttcattatactaaaatgtcatgagtacacacaattccttcctccgctcaccttttcatcctcatttatattctcattaaaatatgtagagcctatttacaatactatacgtttagtttattatatatttgtaattagtgaacacaccgtttagtaattaacgtttttaaatatcacctgtttattgggaataccaatttagaacgtggaggatgattatgatggatatgagacaacaagtgaagaaggcacctgtacccacctggattatttttttgctggcatcagcttgtggattgatcgtggcaaacctgtattatgctcagaccgttatcggtccgatcagcatgacaacgggtctgtcttctgccgctgccggattgatcgtaacgttgactcagattggttatgtcattggtttgctgtttatcgtgccgctcagtgacattaccgagaatcgacgcctggtcgttcttttcctcatcgtactggttgttgctctgattgctgcggctttctcgcccactgctgttgtatttctgactgcctctctattcattggtataggttctgtggtcgctcagattctggtgccctatgcgacatatcttacttccgaagaacagcgcggacgggttgttggcaatgtaatgagtggtctgttgctaggcatcatgctggctcgtcctgtcgcaagctttatcaccagcctcttcggatggcagacggtctttgtattctccgccattgtcataacacttctcatgttgctcctatcacgtgctcttcctgctcgccagcctgaacccaccttaaaatacgggcaattaatcgtgtccttgggcacactgttcagaacgatgccgctgctgcgccgccgggcgttctatcaggccagtctgtttggtgctttcagcttgttctggaccacggttccgctcaggctcgctaacgattttgatatgtcacagcaaggcattgcctggttcgctctggctggtgtcggaggtgctattgccgctcccattgccgggagactggccgatcgcgggctaacgcgtattctgacgggtgctgccatggtgatcgctgctgcttcattcggtcttgcttatgtgttccagagccactccacgtttgcgttgatcctgcttgttatcgtggcaatcacactggatatggctgtctcgggaaatctggtgctgggtcaacgcattatctactccttaggaagtgaagcgagaggacgtgtgaatggcatattcatgtcgatcttttttgtcggcggtgcgattggttcatcccttggaagctggtcttatgctaacggaggttggaatctcacaacgctgattggcctgattatgccgctgctcgctttggtgtattactttacggaaaagaaagctgccgttgtcagcaaacatctataagtgcgatgccttcaggcatccttcctaatcaaaatcggacttttgaacaacctctataacaattctttcatatataaagaagggcagagtgatctctaagatccgcttctgcccttttcccttatttcatgacactgaattttttggtcgttgccctaacttgatcatcttcgccccatacaatgacacctaccactttagtagcttccaattccatcgaagcaatctcaactgcatattgttcaaaggcattgttgagcgactggcctgtctgtgaaaaaacaacatggctcagtcccccgctgtcatctgagcagagtttggccagattgatcagttgattctccccggccttcagaatgacagtgctatatcggatgccggcatgctgaacgccgctatgatccagcacaggttgatcacaatataactccggctcattcagggctgcttgtcccattaacagggcagccacattggcggcggcgccaggttccagatttttatccagtataatagcaattcttttcatatgactgtattcaccctctgtgtattttgtgtaaaacatacccatggcatattgattccctcacgcaatactttgtaggtcacaagcccgtaatgatcagcgcatagctgattcgtgagcgcaatggacttctccgtgttgtgcatgaccttcctgcaagcttcagggttggacgatacggtgctgttctctctataggttgtatcaagttcagataacaagtatgtggtggctggatgatgatagataatatcgatctgatcgggacataccgcatggaagccggatagaaccagcgcaggaattttctccacaaagctctcagacaccgctagttcagaatccatgataaagctgttgagcttgggatacgccccggggaccagtaagcaggatatgatccctgatctcaagtcttccgcagccgcttcaaattcagggtatggcttgatacgttccgagttgcctaatttcttcgcgatatgcatgctgcaagtcagaaatccttcatcgtctcccaacgttcccagtatggcatatttctctttaacgatctccatttatttctatttcctcctttttatttctaatccgctaaagatcgtataccaaaaaatccctattgtcaattaacactttaacgcaacataaatatgtattttggttcatatttttaaccaaaaggtgtattcaaaatggaaaatattgagctataatgttatgaaatgaatttttactatttttagtattttgttgaaaggggatatacgagaacgtatgaaaaccattgtatacatatctgatttcaggcttccaactggattaaacttcgttaaacctttgcagaaattggcggatcataagaaaattctgattattgaacggcataatttgcatcatgatgaggtcctcagagacttctttgatgaaattagatatgtcgatcatctggagtccgttgatgccatccgggagcatatgatgcagatccgagaatcccattccatctctgctttgttaacgcctggtgagaatgcaattgagatcggtggtcagctccgttccgagttcgggatccccggtatgcagcgcaatcaggctgaggctgttcgcaacaaatggatcatgaaacaaatgctacatcaacgcggaattcggacatccgaaattgccattgctctacatgaacaggactatattcgtttcactgctgtacacgggtttccgattattgtgaagccactcagcggatatggaagtatcaatacgttcaaattgtccagcatggatgaactggtacattatctacaccatacaagacaagcacagcaaagggatttgctggaggaattcatccagggtacggagtttcattgtgattccattgtgtccaagggcaaagttgtatttgcatctgtttcccaatacctgtataactgcctcgatattgcgacgaagcagaaacctccagccagtattacgttccctgaaggcacggaagctgattttatccatcacatcaaagaactcaatgaacgggtcattgctgccttgggtatcaatcaatccgtaacacatgccgaactttttctgactccggaaggagaagtggtgtttggagaaattggtgcaagaatcgggggatcacatgttatgcctccttgtatcaagaacacccatggcgttgatttcttcgaagccgtcactgatctggaagttggaatatatgaatttaagcaacaggagacgcgccataaattcacaggcatgatctgcttcccttcacgcgcaggggtaattcaacacatatccgggatagaggattatgccgatatccctggtatcgttgagttcaatgtatcctatcaagtgggacagcgcgccggggacgtcaacgataccatgacccgatcagggtatgctatcgtggagggtgattcgttcgaggaattgcgtcaaaccctgctggaaatgtacgatcgcttcaagattgaagtgacggttgctgaaactgtgtaagatgtacggatgatcctcaccgtttttggtctggagtgacggttatcttagggagggctggaattattgtcgttattcaaaacgtacgcgggtctgagccgcgatatctattatctctgtttagccagaacgattaacagcacgggagattttgtattctccctgattaccttggtgcttacgttacagttgggcatgaatgtggtcagtgcagggatctttgtgtccatggcagccctgattagcggacccggtgtacttcttggcggctatttaagcgatcttatgggcaaaaaaacaattattgtcattgggcaactgttgtctgccatcctgattataagctgctctttttggtcaggcacccttaccgttggttatcttctgattgcagtcatgttcttcatcagtattacccggcctgcttataatgcactgattattcaactgtgtacggaggagaaagagcgaaagtccgccttttccctcatgtatctgggggccaatctgggtatagccatcggaccactggtcgctggtttttttatcaaggatcatgtcaacattgtctttataagtatcggtaccgtgtttctgatatctacctttatcatcatcaaccaggttaagatcggcacacgcaaggaattggcatcaacaaacagcgaacatgctggacaacaacaagaacaacaacgattgagccaaccgccttcaccattattcagactactgctgaaaaacccactcgttgctttcttcatcgttgtgtcatttcttaactattttatctatatgcaatactcatttagcctcccactccagatgaatcactcgtttggcgagaacggggcagcctattacggctctgtcatgaccatcaatgccattagcgtcattattcttaccaccgtgatcctgtccgctacacgcaaattaactgccctaaactccatagccacaggcgcactcttttatggaatcggatttggagccttgaacctgctcggaaccttcccccatttttccatcgtcgccttatccacggtgctgtggaccattggagagattctcgtgcagaccaatatcaatctgtatattgcttcgcgtgtacccgatacacatcaggggcggtttaatggcttgctgttattcgtaggttgcctgggttatacacttagcccatatttgacaggcattttcatcaaaagcatggacatggaaagtgtatggatcattattctggctttcagtctggtctatgcgttgtgcatgataattctctggtatatcgaaaaaagctcaactagaaaaagcgaaatgaaaccgctggatcactcaaaaagtatctgaacctcagggcagcctattctgccctttttttttactttattttcacaccaaaacaggcaaatgtgcattcgcattatactcgaccaattgctgacccgcatgcagtctctgtaccagatctggattggcgataaacggtctgccgaacgcagccagatctatgcttcccttaccaatcgcgtgctccgcggtttgaacatccaattcccccacaccaatgatgatttcatcccaccgacttcgaatccgctcgtgaaaggactgcttcccttcccacgcttttgtatattgatctgttgagggatgcaagatcgtaattcccgtctcacggaacaagttcagatatgcttcgatcattccagctttgtctacccaagcataggatgcatcatcatcctttttctctgaaaatcgtaccgatatgcgatccacagggatctcttttttcacagccacaataatatcccgcaagaaccgcaatctgcccgctgtgtcacctccatattcatctgttctttggttggtcttctcattgataaactggtcgatcagatacccatgcgcagcatgcagctcgatcccgtcgaaccccgccagaaccgcattgcgggtagccgtctgaaaatgctgaatcgtatccgctatatcctgtgtactcatcgcttggggaacctgatacggcttatgcagcttatgcactcttccctctgccgcaaggctggaaggtgcaagtggagccgttccgatcagatcggagtgggacaacctgccaacatgccacagttgagcaataatggtgccgccatgtctgtgaacagcatccgttacccttttccaagaagtcgtctgttcatctgtatataaaccggggatgccgtaagtgcctttgcctgccagattggggttaatgccctcggtaatgatcagtcccacaccatctcgcgcacgctgctcataatacgccaccatctcatccgtcacggtcccctcccgatcatcagcaaatccccgggtcaacggtgccatcacaattcggttccttaattgccaatgatgaatcgttaccgggcttaataatgttgaacgtgtattcgtgttatccatgtcatatccctactctctttgtcattaaggatattgtacggcggctccgatatatcgtaaaatgattgaaatatatagttgtatctctcagagagatacctaacatcagcatctgcagaagtaattgaaggtaatccacgttcaggaggatacagcatggaactttccgatatcgatattgttctcgcggtggcgcgttcaggcaaaatctcacaggccgccaaagaactgaattacgcacaatccaatgtcactacacgtatcaaaaaactggagcaggaatatcaaatccagttgttcaaccgatttcccaaaggtgttgtactgacctccaaaggagaacagttcgtccagtacgccacacagattcacaaccttttgtatgatctaaagcaggatatgaccgatcccggtgagccttctggcacgctgaaaatcggcattgtagaaacggcggcatccagccgttttatggagatcctgaatgaatatcagataacctacccgaaggtgtccatctcactcgtcaacgccacttcacccaaagtactgcgcaagaaaatacaggacgatgagattgatggtgcttttatcagcggggcttgtgtgaaagaaggtctgaaggtggaatatgagatgcaggacacggttcatatcatctccaagcagatggatacaccacccgaaagtctgtgccaagtatcgtgggttgttttccccgagggctgtccgtatcgtgaaataaccgaagaatttttgcaggaagaagggttgtccgcacgtaatatcatcgaagtgagtacgatggaaaacctgcttagctgtgtggagtctggaattgcttttaccattatgccgtgcaacgttattcacaagaaaccggatgaattctccgtatttgatctggaagatcgttttacccataccacgacaacctttgtccgcggtgaggatcggtacgtcagcagtgcgctggatcaattcatgaagttgctgaatcagaagtgcattacgttttgatatagataacttttataagcagcagtatagtatgtacattcacagcagtcaggagaagatcagatgaaactcatgaatcttttatataggctcattgatgcccggcgtgtcgacaacaatgcagaacaagtgtcctttccatcccgtccacatcatacgctgcttgttgtgatcaaagggagcttaaccgtcaaagtcgaagacaaagtcatctccctatgcgcacctcaagtcctttccgtcccaccttctcacacctgtatcgcaactactgaggtacagcatgattttgaatgtgtcaccttaacctacaatgtctacaacgaagaactggatggcaacatgcagcgagttattgatccacattttgatttcattgccgctgttgttccctcagctcccgtgctcgccattcaaatccatgaaggtgggcagaaggaagatctatgggctggaatggcacgtcagatcctctttcaggaactgtgtcttctcctattgaagcagaaaaagcaaaaatcccaggaaggtaccgccatggaagcggtaaggcagagccaaaaatatatcaatacacattatcaggataacttcacacgcgaaaaactggctgaaatggctggactgagtgtcaaccgttattccagattgttcaaaaaaatgattggacaaagccccattgaatatttgaacgccgtacgcatccgggaagccggtgatctgctactggcctcggacaacacgatcaaacaaacagcccgccaggtcgggtatgaagatgaattctattttagccgaaaattcaaagcaaccaccggactgtctcccatggtttatattaaaaagcatcgctccgtaacacgtatcgcttcacttgcccatccctatacggggcatctgcttgcccttggtattgagccttatgcggcactgattaatccggtccataggacatcatatgaattcaaaaatgtgattcaagtgggcagagatcagcctgatctggaactattaatgaatgcacacccggaactgatcattggctatgaaggaaccgattatgaagagccaaaaaaagccgaattatttcggcatattgcctccacttgcaccgtatcttttgcaggagattggcgtaaacagatgtactccattgcacaatccgtgggcaaaataacagctggtgaagaatggctggaacgttatgatctatcggtcaaacaaaaaatctccagtatacagcatgccatcgatgaccgccctgtggctgtagcacaatacgaagatggacagttccgggtctacggcaaccgtaatctagggacggtactctatgatgatttgcagttatccgtaccccaagctctacatcacgtatcccattcccgtttaatgtcactggaacagctggttcagtcggatattgaacacttcattctatttacaagtggccaagcagacgagcgtgcgcacactgtagcgtcgcttatgcaaaattcaatctggcatcaatgggaggcggttcgtatgaatcaattctatgaattgggcgattcctccccctactcctgttatacttccttggctcataatctgtttctgaatcgggttagtcaattgttcctgagccaaacgtccatgcattaaacaggaatatccatggattacgatttggaatggacctataattattttgataatgataatcaaaatcaattaaagggtgtgtacaacgtgtctttacctaacaaccaacgcttctctacctttttcaaatcaggacgattccttataaccgttcttgttctatgcagcatgcttgcgggctgtgggacttcccagaacagtgggaactccgcttcacccgaatctaatggggcagagccatcaaccgctgaacagggaagtgagaatacacgcaccatttctacgatcaaaggggatatcaaaattcctgccgaaccccaaaaaattgcgggtatgctctacgtctttgctgaccagttactcgctctcggcattgaaccaacagccatggtaacgtataacgatctcggattccctgaatatctggcagatcagatgaaagataccactgccgtaggttccggcgagtctcccaattttgaagcattgctccaggctgagccggatctcattctggcctccaaaacgttaaatgaagcaaactatgagcaactctccaagattgctccaacgatcctttttgataatgaagaaaaaggagactgggagcgattcatggaaacggcaactgttcttggcaaagaaaaagaagcccaagcggtcaaagatgcctatgataccaaagtcacccaaacccatgatgagcttgccgtaaaagccaaagacgaaacggtggcctacatgcgcgtgcaggataaacagcttcagttgattaaacctgatgataacttcactctgtttggtgctctgggattaacccctgcttcagtagacagtgtagatttcgagggatcatggaatgtggcaatttccgaggaaattctgcctgagctgaacccggatcgactgtttatcattctgcgtcctggggaagaaaacaaggtagtgcttaataacatcatgaatacatccatctgggccaatctgaatgcagttaagaacgatcatgtatatatcggtgatgccaacctgtggtttgcaggatacggtcccatcggtcttagcaaaattattgatgagatcgctgcttccttcgagttatagagggacatgatgaaacccaaaacaagtcttaggcagaccgtgatcgaacgacgtacgattcaggaatttaatggcctacccattcccttggaaacgattcatgagattctggaggacgcgatatgggctccttttcactccaaaaaggaaccttggcgcttcattctgtttatgaatgagggcagagaaacattcgcaagcgctgtattgagtacacgtaatcctgaatttatagcaaagtatggacaacaaatcagagcggcctattgtgcacagacacctgtgcatctggttgtggttatgacagccaacctgccctccaaggcgtgggaagaggcttttgctgcaacctcggcactgatccagaacatacagttgctcgcctgggaacaacacattggcgtcgtatggaagacaagtcctttcaacgaaaatccactattctgcgaagccattggtgtgacatctgaggaaaaaatagtaggtacactacacatggggtattttaacgctgaagatcagcctatgcccaagcctcgcacacctctccctcaactgttgcatctcattgatcactaaatggactagagcacattgatcgagagcataaaaaaaagggatgtcccctgtcatattcatgacttataggacatcccttgttcgtgttattttgttttaatgaacctgagacacgctattcgctcccatttgcccagatctgagatctaacgaatcacagagacgttatttcgtcgattcactcgattttctaggttttgacaacgttttttgacgaaatagcgttactgagattctttaaatcttgcaagcgttgatgatccgccttttaaggtgcggtaggttcgttagcgcttggagcgaggcggaattcattttgagacagccccttactccaccttgaatcgcgcagccgattcggccagcttttgcgtcaattgatcgatcgtatcgaccatgttggccaactgctgtactgtcgaagactgctccatcatggttgctgttacctcttcaaccgaagcggatacctgctctcctgaagcggacaaactatgggctgactccagtacaacatccttgttctgcaacatctcttgcatctgtcctgccattgtagcgatctgttgattaatgaccgataccttctccaaaatcacatcaaacgcctgacgagtctgcaagacaagctcatcctgtctggacgagatggtgtgaatctctgccacactttggttgttctcggcgacatcggccagattctgctcgataatgctggagatttccttggattggcgggagctctgctctgccaggttgcggatctcttcggccacaaccgcaaatcctctgccatgctcacctgcccttgatgcttcaatggaagcattcaatgcaagcagattggtctgcttcgcaatctggctgatggcttccgtgatctgactaatactgcccgagctcgtttgaagtttgacggtaatctccgagattttctccacttcccgctcgttcacctcattgatacgcatcagttcattcacgacttcattcccgttgtggaatacagtctcgatctcatccgctcttgccttgacatcctgtgcactgctgttcatggcagccactttatcgccaaagctgttgaatttgcctgcaatctgctcggtatcttccgattgagcctccatggctttggcaatccccatggacgtcgccgatgtctcatcaatggatcttgccgtctgtctggatgtctcctccaactcctgagtgctggcctgaaggacatgaatcgaactattcatatcggtaataaggttcctgttctgctccaccataccattgaagctctccgccagatccttgaattcgctgttatacttgccattggccttaacggtcagattgccttgagcaagctgttggaacagatcgctcagacgtatgataggtcttgtaatactgcgagaaatcagcaatcccacaccaatagccagagcaatcccgatcaatatcacgataaccatctggcgctgcatatcctctatcggacgcttgatatcgtcataatcgtcaataatgagcacagagagatctgcacccggaatctgattaatacgatagtaggtatcttctcgatccatcgaagtgattttcactttgtcggtggctctggcctcgataattcccatcgcgtccttatcctcttccagcgtttgtcccacaacggaagggtccagtgaatcatacataatgatgccgctccgactcagtacttcaactctgccttgaccattgattttaatgtctccgagttgccccaggaagaagctgctgtccaccgacatagcaagcacacccaggttattcccttcttcatcggtgataggctccgagaatacaataatgagcttcttgctagtcttagagacgacggcatcactgatgaaggatttcccctgtatagattccttaaaatattcccgatctccccgtgactgaccaatcacttccggcatggttcctgccaccatgattccttccttatcaaaaacgaacagatctggcttacttccttccgtttccgatatactgtcggtcaagatcgtattggccttattgaaatacgggttctcatccgataaaaattcttcatccgtcatgtcagttgtattacgcagctccaagagttccttgaaggtattatgtacggatatggcatgactcaattgttgttgaagctgcatagctgtccaaagcccttccccaaggcggtcagccatcacattcatttcatccttgcttttcttgaccacaacatcagatgaaatcatataacttgtggtcgttgcaccaagcagaaccaaaacaaccaatacactgatcatgaaaggcagcttgattttaagcgacatatttttgatcttatgtcctacaccttttcttttccccatttccttctccccacttccctgaaccatctgcatctgaacgatgtacatacattatcggaaaaatccatagtaaaattgatcaattagggagatattgccactgtttttctttttttgaaattctgatagcaacataaaaaaatggcctgtcagatcgactatccatcttgggaatggatgttgccgttatctaacagaccgttttaagtttttttatgaatctattaagtttacttgcgcaatctccgggaactcaatgcgtgatgaccattctgcaagaatgtactgcgcgtattcttcatctgttcaatccgtcgctcagccagacgatctgcggcaacataggttgcgatgccctcggtacgtgagctttcgaatattttctccagagtggaatagatctctccgatcttgctccacgcccgatccgcgttataaccgttcaactcatccgcaatgttaattacgccacctgcattgataacatagtcaggcgcatatacgatgcccatatcatacagctgatccccatgacgggtctccagcagctgattattggcacagcccgctacaacctttgccttgagcgttctgagcgtatcgtcattaatcgtgccgcccagtgcacatggtgcatagatatcacactccacactcgtgatgtctgcgggatcaactgctgtcgcgccgaagcggtccacagcctgtttcaccgagtccttatggatatccgtaacgatcagatgtgcaccttcctcatacagatatttgcacagatgcatcgccacattgccgacaccttggaccgctatcgttttaccctccagcagatcggtaccaaatgcttctttggctgctgccttgatcccacgatatacaccccaagccgttgcaggcgatgggttaccggatgaaccataactcgcggagatgcctgtcacataatcggtttcctgatagatcaggttcatgtcctcttccgttgttcccacatcttcggccgtgatataacgtccgttcaacccttgaatatatcgtccaaacgcccgaaacatcgcttcgtttttgtcgcgccgcggatctccgatgataacggttttgccaccgcccagattcagtccggataccgcattcttatatgtcataccacgggcaaggcgcagggcatcttcaatggccgcttcttctgaagcgtaagtccacatccgcgtgcctcccagcgcagggccgagtgttgtgtcgtgtatggcgataattgcttttaaccctgaatttcgatcctggcacagaaccagttcctcataatcgtgatgctccattgcttcaaaccaactcatgtgctaaccgtctcctccaaccatttttgcgatccaatcgcattgttctctattcattgaccatcctctattgtacccatgaatacccagtttgtgcaaaatcacatcgcaatgtcagagaagcatcgatcgatgtttctcatatggcgagagcaaagcggtcgaatttcagattataattttatcgtctatcaatagaaaaacctctcccccttataggagaaaggtacacttccctaaactgcatcaacatcttcgtcatgggaaaacccacgcatcactcctgtttaagggagcgtttcaaccacattgattggatgcaaatcgccatctacagcaaatgaagcctgtcctgtctcctcggagacaactaatacaaccgcatccgtcaattcactgagtcccagtgctgcccgatgacgagtgcctatttttcgttcatgcacttccgcttgcgacaacggcagcacattaccagcggatacaatctgattgccacgaatcaacacagccccgtcatgtaatggcgcaccaggaatgaatagcgattccaacaacgcatgcgtcactcttgcatccacagtcacgcctgagtgaatgatcgactccaacggaatctcccgttcaatcacaatcaacgccccatatctccggtcagatagatgctgtacgctcgatgttaattcggcaaacttctcggtaaagggtgacagataacaatccagataaaacgaagaggcgagcacctcgatctgcttgatctccgctcgaatctctgcaaattgccccagcagacaggcgctgtcattgtcaaattgggataacgtcagattcatacgctctgctacacgatggaggtctgccttaagcttctgcctcatcgaggaactgtcacagtctgcttgctgagtcatcattcgccgcctccttggttgggttgggcttcacgccgcatcattagtacccataccttcccctctggagaagatatttatgcaatggcagggctgtaggagctaatcatcggcttcattgtaactgatataacaagcaaaaaaagagcctgtccgcaaaactccacggtcagaccctattcgcataatgatttgatgtctgtctactttacttattgcgctttgccgtatgaacctgtcttaaatgtagtcggatcataccatttgtaccctgccgctggtgcagcccatggctcaagttgcggctcggttgatgcagccggagcttcgatcggaagcaggcttgttgctgtatccaatgtcagtcctggcacttgcgccagactggtgtagctctctttgaccgcgagccatttcacagtattcacaaggaacgttgcatcatccacttctttgaatccatcataggtcttcttggtagcaccggtctcttcacgcaaatatttcggagtcgcgtcttccacaggtgaagagtcaccgataaatgcggctttgcccgcaccaacctttgcaatggctgcataggctccttcagctcgtccaccaccattgtatacgccctggtccacggcattgccccacttggacacaccacttggtacatacaccaagcctttggctttgttcgggtctataatcgcaatggtcgatcccgcatgcatggctacagaattaacaccagtcgtaataccgaaggattgtgcaggtgcgacgatatccgatgcattaacatctccaagggcattgtagcggaaacggacaccaaagttcgtcgcgagccagtctgaactcgtcacactctgcatggctggtgattcggcttcagccgaagacatgcctttggccggattcaggaaggcaccgcggcgatagccgttaaatacttcggaagaatcccaacggtttttgttgcgatctgcattatagtggtcggagatgaagaaaacactccctccgttctgcacgtactgcaccagcgcaacctgctcagtcgctttgaacggcacgttggcttcgccgatgacaaagacgtcgtaatctttcaatttattataggtgatagcttgctcaccgaatgtatacgggatgctgcgttccagctgatccacggcaaagcctgcgtttcgcaaaccattggcaaaatccgaaaatgccccgtcaataatccagtcggcagcacctgctgtctgggcgtgggtattatcgaacaatactttcttgccggtaccatccggcagtgttgtgcccgggttcggttctggatcagggttggttgttccggaggaaagtgtgatggacgttgggtttttgactcctgcatagctgttgtaggcaccgagggttccggttacgatgatctttttgcctacaagactggggtttgacgccaatccatattgcgaacggaaagatgagggaatctgtacatccaataatctggcgttggttcgctctgacgctgaatctgcaatcagaacattaaaatcattggcatacggagatgtaaacttcgcggtaagtgacccggtagcatgtccaacaatgattccttcaaccgttgctgttcctccaccgctctgggcagcgatggcctgagataccgtaagtggtgctgcagcttgtaccggactttgcgaacccggccccagcagtgcggttgccatcatgataaagaccaggaatgccccgatccagtgctgccataacgccttcttcatattccctttctcctcctccaaattacctgataatgggttatcctcctttaatttaattgttcatatgctgaattcctctttctttttgtaaagtttatgaaaaagtttagaagttgagtctattggcccatactgattatcattagaattccatttaccgaaggagtaaaacgatgatgaaattggtatttttgatactcttgttgattgttccgctgattatggcttatgttgctcttcgttcccggatggttagacgattgtttcatattcttgcgctgctctgcttctatagtgcggcaacggtcatcgcaggtgatgtgtatgcgacgaatgctcatatgaccacattcaccaccgagattcatcatttcctgttgaatggctggttcctgtatccgtctgcatatctgggtgtatacattccctatgtgctgtggatgagcctattttcagaaaaaagttaaattcgatgcggacttgggattgcattttaccaacgttcattgcataatgaatatataaacgtgataatgattatcattcttgaacttgtctctttgtaactttctactgcatatgattttacgattttatagataaaggggaacgaacatcgaatgaatacaactctgcaaaaggctgatctgcagcttgacgattatttggatcttctgaacctggcaaccaacctgggtgatacgagatggcaaaaggaaattatccgtaagctggcttatacttatcccgcagttcaatgtaaacaaccacaatagcatgccacatacatcataaatctacattatggctcatgaccgattcattcgttgaatctgttgtgggctatttttgttgtacaatgtacagtaaagttactcaaacgtgaaggagtgaacaacgatgcaactggagaccgaacgactcatcatcagggatattctggagacagactggaaaagtatacatagctacacatccatgactgaagttactcagcatacggcttggggaccgaatacagaagaagatacacgagcatacgtgcagtttgtgttggacacacagcaggcacatccaagagagggctttgaacttgcaatatgtttgaaaagtgatggaactctccttggcggagtcggtattcacgtgatggagaaaaccaatgcagagatcggttacgtccttaatcccacctatcaagggaaaggttacgccgccgaagcagcccgcgctttactaggtttcggtttcaacgaactcggcattcaccggatttacgccaagtgtcgtccgcataacactgcttcggagaatgtcatgaagaagattggcatgcagtgtgaaggtctgctgcgggagcactggttttacaaaggttcctttcatgattcggtgctctattcgattctcgccagagaatatactaatgaacaatttcaaagaaacacaaaaagctgactcccatatatgggacgccagcttttcttttactccgtaacgaccccaatcgccaatggaggtgaagcctctgaacaaactaatttacaaccggcacagctctaccgggcagcttgggaatgtcggacatccacacatacagcgcagggctgccaggtcacgaatcatcagtttgccgtccatcatatccagcgtaccttgttccttccatgcccccagcatccgcgttacgctctcccgggtagctccaatcatctcggcaagatcggtatggttcagcttcatgtccagcacaataccatccggtgtaaccctgccatacgaattgctggcacggatcagtgtcgaagcgagcgcacccgccttgccatagagcagcaaatcccggaatctcgactgggtaatccgttgcgacagtgccatccattgcaagaatttcaaggcaaggtcgccatgtttgctgagtatactttccagatcgctaagcgagataatggccagttcccctttttccgccatctctgcactgtagctatgattcaatccgccgatgccgccgaattcaccgatgagatcgccgctttgctgaatggataaaataatttccttgccatcctccgtcgacttggtcattttcactcgtcccgaacgaatgtagtacagatatccggcttcatcgccttcgagaaagagactataccccgacttcacccgtttgggctgcatttttgcttcaatcaggccccattgctcagatgtaacgaacgaaaggattccacctgtttctcgtgtcattttgtccgcctccgtttgtttctgctctgctctttgggttgttctttctacaaatactgtacccataaccttcgtccccctcggtgattccttatgtatccatcataccgcgaaagtagcgcgagggttatcgggggattacctgatcattaacgagaaactccctgaatttgctgtgagaaaagtcacatttcaccgatatgcctcatccttcgcatttcttcaatcccttggtgcacctgactcaggagtcctccactgcccaagttcagtaaattatagaacggaaataggggttttccctgaattacaatgtacgagaaagggtctacaatagaattaacattgtaatacccttactttaagatgatcctgtcaaaggttaatgataataattacacgttacgtacgttataatttcgaaaaaggaagtgtcctctcatgcatgatgaactgccatctggcattcaggagatgatcgacggcctgcgcctgaacacatccagcgacttctgtggacttgcctgtctgaacgggacgatgctacgctggaagtatgcctctggggctagtaatgaacgggtgaaacgaatggaaatgcgccccggacaagatctggtgggcacagcccttcggactggacgcacagcccgatctgatgcacaatccaccggggagcatacacccggtcgttgcccgttaatgcttgctgagcggctggtaagtgccatagcggtacctgtgttccaggaaggaagcgtgcctggcgccgtgttgctcgttggcagcagactgccttgcaccttctcatcggacattatccggcagacggagcaaatcgcgctacatcttcagccaaaggtgtttggataacaacatctgtctttaatatggaagaagtcttgttatttccttcggggagtatcaaggctttttttattatagttattcacagcggagcaagccttagtctgttcacctgtcttcgctcatctgtatacatcgacgtcagtcacacagattgatataatcgagtccatacattcatataactcatagatagtatatacagctaaggaggctacagatatgtttgtactgacaactgccagtgttattccatgggaatccacacagcacaacagtaccatttccataaaaacgccttcattggttacctgcacagcgacagtggactatagatatggtaatgagcacggtgttttacataaaggacagttactttttctacatccccaatgctccctggagctgatacatatcccaccttctgccttcaccctgtatcatatcggttttcaggattatgtattaacggaagagagtcctgacaaacgtgtttatgagctaacaacagtgaacttgccctcacatggttcgaagaccggagcaagtccacaggctctgcgaatgctggcaatcatccaggatctttccgaaaaaaggacaggaagtgtccagaccgaagaagccaggtcccattatctgctgagtgaattgcttgaattattcaagctggcgattaaaccttctacagaaatggtagacagtataattcgtgaagcacttcgctacatgaatcatcactatgacagtcatctcacccgtgaagaactcgccagattaaccgggtttaatgcgagctacttctccaggttctttcaaaaacaggttggacgaagctttcaagctcacttgacccgagttcgtatggacaagacaaagcaatacctgttgtccacgcatgccaccttaaatgaaattgcgctgcttgtgggatactccgacggtttatacttaagtcgaaaatttaagcagtttactgggattagtccaagtgaataccgactacagccccgcgcaagacgaattgctaccgtacagtacacaggagatctgttagccttaggcgttcaacccattgccgcctcattcctaccctgggctatgtcaccgctgatccaagacgagttgcatgatgtactggatttggatcaatatggtgtggaagaaatcctccgaactgaaccacctgatctgatcatcgcgccagattatctatactatttgccccataagctcgaacaactggaacagattgctccagttatggtcctgccatgggacaagttaaatcgattggagaccgttcaacttatcggacgaatcataagtcgagagcaggctgccgaagactggatagagcattacaccgcgctggtcagcagtgaggctgaacgacttggggctgcagtccagcctgatgaaaccgttgggttatatgaactctgggaagatggcacgatctgtatctggaatgtaaccgccagagcggcatacaacgtctattatggactcaatcttacacctcctcccagtattctgcgtgacgttctggaacctaataatcatcagttcatccaggaagatcaattgacggaatatgcagcaaaccatatgtttctcgtgctctcctcacatgaaggcggtctctatcatgatgcacaagtcaagctcagggaacgaccacactggaacaaggttatgaataacggaaagagccggatatatcctctcaagctggaacaattctggtgtaatgatgcgctggctctggaaaagcaacttcagcttatggtagatatcctgattcgggagaatggtgaaaagaacaggtaaccattgtccatgctcaagaggtcacattttgagatggacgacacttgtatccaaaagttacgatactaaggaggttttattgagaaagataatcattattgattggggagaagcagaatgacaggggttaaatcaaaatggtggactgggcttatgttcctggtactggtgattggaattattggctgctcaagccaagtggaaaaaacgacagaaaataaaccttcctcaactacagctacagaagagcaaccggcaaacagcgccttagaaacgcaggtcatatccaccgttaatggagacgttgaaatcccggcgaacccgcagcggattgtgacgcagggctacctcgctgattttctcgcacttggtatcaaaccagtaggcgcaccggattatgagctggaaagcccttatgtgcttgatctggttgaaggcgtagcagacattggtcgtattgacggtggttcagtggaaaaaattctttcacttgagcccgacctgatcgtcactgtaggtggagatgagaagctgaatgagcaatatcgcaaaatcgcaccaaccctcatcatcccttatggtacatatgacaatgtgcatgaggaaatcactgcttttggagaaatcttaaacaaacaaaaggaagccgcagactggttgtcccaattcgaagtaaaagtgaagtcagccaaggactccattcaagggttggtccaggaaggtacgactttctccaacttcagcctttttggtaaggattggtatattaacggagatggtgtcaaccgcggtgggcaagccatctaccaacagctcggactgaaagcaccagacattgtacaaaaggaactgattgatcaggataaagatactgtaactgtatccgaggagaaactggcggattatgcaggtgattatattttcctcgatttatccaatggtggttcgctggatgaaacatcacccgtctggtcatccctggacgccgtgaagaacaatcgagtgttcaagctggatggggaacggttctggccatatgatcctcttgccgtggaggcacaagtccaggaaattgccaatatgattcaggaacgtttcggccaaatagaacattaaggttcaatgtttctatcccacacgttgagtgagagaagctattcggagattaaagctctgaatggcttctttttttgttatgatatagatagaactaaggaagcggacagggggaaatcatgtgattcaactattagttgtagacgaccatgttgtcgtgcgttccgggctgatcgccttacttgaaggaaagaatgatatacatatcgttggagatgccgcagatggcgatgaagccattgccaaggctcaagagttgaaaccagatgtggtcttgatggatttcagcatgccaccaggcaaagacggtctgaccgctactgctgaattgaagaaattgatgccagatgtctccattttgatactgaccatgcatgacgatgaagaatatttgttccgcgccatccacgcgggagcatccggatacatactcaaaagtgcgccgcatgaagaattgcttgccgcgattcgttccgtagcagagggtagcgcctatctgtacccgagtgcgaccaagcggctgatgagtgaatacctggacaaagccaaacaggaaaacgccggaccgtatgacacgttatccgagcgggagaaagagattttgtcctggattgccaagggttacgccaacaaggaaatcgccgaacatctgatcatcagtgtcaaaacggttgaatcccacaaaagcaatctgatggagaagcttggcctgcgcacacgaccggaactggtgaagtttgccatgaaaaaggggttgctgaactttgagtagtgcacgcaagaacagactaagtggactcgcagaccagcccgtacgcctcctgctgaacgaaatagataatcacattacggataatgaatttcgcagcaggttgaagggttccctgcatcaactgagtgatctgaaatttgccttggatgaatcctctattgtagccctgacagaccgcaagggtaaaatccagtatgtgaatgataaattctgtgaaatctcacagtatgagcgcgaggaactgatcggtaaggatcatcgaatcattaattctggataccatggcaaaagctttatgaaaaacctgtgggacacgatatcctcaggtaaggtatggaacggggaaattctcaatcgtgccagagatggcagtcattattgggtcaacaccaccatcgtgcctttccttgataacgacggggagccatatcaatacctggctgtacgcagcgaggtcaccaagctgaaatccgtcgaagccgaattgcaaaagatgatgtcccaagtgatgaacattcaggaagaggaacgacgccggatctcgcgtgaactgcatgacgggattggacagagtctcttctctctggtgattcagatggatcgcctgctggcagaccagcctcaccccggggttgaagcacttcgtaaacaggtcacgggtattatggaagatgtacgcggtatggcatgggaactgagaccatccgttctggatgacctgggtgttgttccggcgattcgtacgtatatcgagaattacacccgtcactacgggatcgaagttgatctggaatgtaatttgcgcaaacgactggagatgaaccgggagatagctatctatcggattattcaggaagccttaaccaatgtcgcgaagtatgccgatgttgccgaggcacgtgttactatagaagacgctgagaacatgacgatggttattattgaagaccaaggtgctggattcagcgaagcaaccgcaggcaatggcgttggattgttcagtatggaagagcgtgcccgtggtgcaggaggaacgttgagagtttcttccgagcctggcgaagggaccaccgttacccttttactgcccaagacagcacagggataaccgtacatgcttcgtatcacactttgcgcttcactccagcttatctattatttaacggctgctcgctattggactgtgcgagtggtctttttatttccgattggtcgaaatgacaaaatgaaggctcaaaatcggttaaattcaataatcatgataaatagattgactccagttacgattcgtcattaaactatgaatgccacatacacattgtatgattagtaaaatttcattgttcatttcatatagcgagagaaaaggatggtcaacatgtcagagaaacgctcctccaaaggaggagaaattccacaaatgtacaatctggacgagatggatcgcaaaattatcgccgcgcttcaccacaacagccgaatatcctatacggatctggggacacagatcggattgtcacgtgtagctgttcaagcccgcattaatgcgttatccgaaaaaggaatcatcgaacgcttcaccgttgtaatcaaccctggcaaagttgggcttcaggtctcggccttttttaatgtcgatgttgaaccgcccttcctggatgaagtcgctgagaaactggatgaagagccagccgtcaccagcctttatcatatgacaggcccgagtacactgcacatgcacggtatttttgcggatatggaagagatggagcagtttttgctggagaagctctataagatgccgggtatcgtcaaagtggaatcacagctattgttgaaacgttataaaagccggatgggcatgagactctaggaggaaatcagcatgggttggaaagattacaacggtctcgtcatcggaatggtacgaaccggaattctcggatatggcggcggcccttcggtcatcccgttaatccgttacgaagccgttacgcgttacaaatgggtcagtgatgaggagttcggcgagattttggctatcgccaacgccttgccgggtcccatcgcgaccaaaatggccgcatatctcggttataaaaccaaaggtgtgctgggcgcgatcgtgtctgtactcgctcatattttgccgacaagtattgccattattgctctgctcggttccatgtacgcgctacgcgagtcgaaagtagtagcaggcatggtagccgccgtaaggccggtcatttttgtcatgctgggcatgatggcttatgaatttgccatgaaagcctggaagggacttggtaaagtttttgccgccctattcggcgtaattgcctttgtactattacagctgctggatatccatccggggattgtgatcgctgttttccttggatatggtgtcttccatctggatctggttcagcgcttcaagtccaaaggcgagtctgataagggggtgtcctaaggatgctccagacatggtgggaattattttggggatttttcgtagcaaacatcttgggatatgggggcggcccggcatccattccgcttatgcaggaagagattgtgaaccattaccaatggatgaccaccgagcagttcggtgatgtactggcgattggtaacgcccttcccgggccgattgcaaccaaaattgctgcatttgtcgggtatcacgtcgcaggctggtttggggcatttatcgcaagttttgccacaatcgtaccttccgcaactgcactaattatattacttcgtctgttgaacaaacatcgcacgtcaccgaaagtcaaaggcatgaccctactcgtgcagcctgttatcgctgtactcatgattctgcttacatgggaatttgggcagctatccactgattccatcggcatctggcagacattgatcattgcaggcatctcgctctgggtcatgaccaaaaccaagttgcatccggccattctgattgtgatcgcttttgcctatggtgcgctggtactgtctcacacgatgtagtagtagaacatacggggaacgtcacagaatcacttggttatacatctgtaataggatggtgtatgcgagggttctggacgttggcgaatggctagattattttcattttctaaggaactcaggacgtcttatttggtctttagatcctctttataaattgtaaggaatctcagacacgttattcaccaaaaatacctgacaaaagtgctataacagactgtactatccgatataacgtgtctcagattccttagatttctgcaaacgctccagacccctgaataagacgtttcagattcgttagcgcttgaagacatgcctagtttataaacaaaaaacggtgatgccagctattagctggcatcaccgttttatttgcgcgtttcacactcacatttggaaaagcaattacttcgcttcaaccactaccgttactttggttttcacacctgcaaatgttactgtaatcgttgctttacctttgccgttcgcctgaatgattccatctttcaccgatgctgttgcaatacgggaagatttccagagagccggtttggatacattagcttcactgccatcggcatacgttgcagttgcagccacagttaccttttcaccaggtttcatggtcaacgttactttatccgtctgcaaatatttcagtgtatccacatctagagcaatcgttacagacttgctgccgtattttgctgtgattttggctttacctgaacctgtagctttgactttacctttggtcacttgagctactttgtagctgttcgttttccattcagctttgtccgtaacatcacgctcgctaccgtcgctcaagaaggcagttaacgtcagatcagctgtatcgcctgatttcagggaaagaaccggctcggaagcttcaatacgtgtgatgacatccacttcaacttggatcgtcacttttttggagccgtattctgctgtgatgttggctttaccactgctgttacctgtgatcacgccttttttcacatccgctacacgtgcattgctggatttccaggttgcttcggatgttacatccaacgtgttgccgtcctcatccgtacctgttagaaggatcgtctgagtttctttggcagacagaacaacgaagttcacatctgcttccagtccactagccatacctacttcaacaggcagagtcagtgttttgccttcaatcttcgcggtaatggttactttacctgtagcaacacctgtgataacccctttgctatctacctcagcgattttgtcgctgctgctccaagttgcatcttcagatacatctttggatgtttcaccatacaacgccagtactttggcagaagtcgttccaccaacggctaccgatgctttcttcttgtccatctcatacttgtctgctacgtctacattcactgtgaatttaaccgttttaccgccataagctacagtgatcgtagccgtaccggatttgtatgcaatcagatcgccatttgatacatatacaacatctgcattgcttgaagtccatgttgctttggaagttacattttctgtgcttgcatcaatatactctgcattggctaccaattttttggacttgttctcacctgtaacactcatggcgagcttgtcagtcacatctttgatatccagatatcttgccgtatctacatccacagcaacttctacggttttgccactgtaggttgctttaatcgttgttgaacctgcactaatcgctgtgacctgtcccttgaataccgttgcaaccttctcgttgctggatgtccatgttgcctgatctgttacattcacatcgctgctgtttggataagaagccgttacaacgacattagccgttttggttgtatcactcaaacggaagaaaatactttgtttcaccacactcagtttgctcgtcagatccacatccacgtcaacggatactgatttcgtaccgtatttggctgtgatcttggcagaacctgccgagtatcctgtaatttcgcctttaagaacgtctgcgaccttctcgttgctggatgtccactccgccagatccgttacatctttggttgtgccatctggatacgtagccgtcactttcacactttcacttttgttcaacaacaggttaacttgctgtttatctacatctacacgtttaaccacttcaacgttaacatccaccgtcacgctttggctgccaactttggctgtgataacggccgtacccgcgctttgtccagttactttaccattcacaacggtagcaaccttctcatcactggtagaccattctgcagtatttgctgctgcattatttgtttcattgtcactatacgttgctgtcaaaataatttcttttgtatctcccgtgcgcaaatccagactttgcacgtttttcgaaagggctttgaccttcttcgttactttcacttgaacagtctgactctgaccctggtaagctgccgtaatcgtcgctttaccttcttttttggccgtgattgcaccattatatacagttgctatcgaagtatcttcgctactccaggttgtactaatcgttacattagccgaggtattatctgaatatacccctgtcaccgtaacagacccagaatcaccaacttcgagcgacatctcattcttggaaaccacaattttggacagttctttgtctgccgcagcggccaagcctacgttggaaatactcagcatcaacaccagcatcatcaccatgtacttggtcaatcttggctttaacatcatttccccccgattatcatcatttttttccttatgttttatgtcggcaagttctttccagatgtttagactttcaggaaattttcagggaattctatggaaattaatttatcttctattcctgtttcaaccgatcatacctgcgaatattgcgcatacctatgtatattggcagtcttgaacttcttttaacaggattggaggaaacataatgcatcagccttttgattacatcgggtattgggaggaaacatatcgttcgggtgaaacttctgggaggggttcatacggggttttggctgaattcaaggccgaggtcgtgaacggactgattcaacgtgaagggattcatcgtgtcattgagtttggatgtggggatggcaaccagttgcaatacatgaattatgaggactacctgggcgtggatgtagcggcttcttcagtaaagcgttgtgcttcccaatttgccaaggattcttccaagagtttcatgctgtatacaccaggcctatggattaaccgaggtttcctgcaagccgatctgacggtctgtctggatgtgttatatcacatcacggatgaaacggattttcgcaataccctctatgatattctgcactcctcaacagcatgggtggtgctttacacccgtttgaaagaaaacggcaacccggggattgatacaatccaggaccgtaatctatttcaatatctcttcgactaccctgatttcaaagttcatgagattattccgcagcgctatccagatcaatcttctgccgactttgtcatcctgagacgtacaccttcgaagtgaaaagcgatcttttcagtagagcatagctaagtctgcaccccaactggacgtaagaatgaatattcataggccagacattcttttgtcttccttcgattacgtacaccatccgcctgtccgctcaccttgatttgtctattcaaagaagcttaggtatactccgtctccagtagagggaatatcgttcctaatcctggagacagccttatgcggacaggtgatgatggtttgctaatgacgctactgacaataaatactgaatatataactgcttaactagttgaatctaatgaaacaactcgaaggctcataacacgacgaccttactaatccgttctcactttcggttcttgcagcccgtagttctcaattcttcttttaaaataaccccgcatgtccacgcagcttcgccagcgcttccatatagaaataatcgccgtatataatcggcacattcaaccctcgcccttccgggtaatgcaccgttccctgcatgatcagaccttcttccgctgccgagtcgccagagctatagtgctcatgcaagccgcggacgatacgttctcccgcggcagcataggtctccccgcgtggcgacagcttcgccagctcaagcaacccgctcgcggcaatcgccgcagcggacgagtcccacgccacctgatgctccgcaggtgcgcggaaatcccacaccggcacgatctcttcgccaagcatggcgaggaagaaatcggccgcacgctccgctgtctccagatatcgggcttcgcccgtataccggaaagacagcgcaaacccgtgcaacgcccaggcggtgccccgcgcccaagcggaacctggagcatggccctgtccgccatgctctcgcagcttctgccccgtgtgtggatcaaactccaccacgtggcagatggacccgtccgcgcggatgaattcgcgcgccacggtgtccgcatgtgcttccgccagccagcggaagcgagggtcgccgctctgctcggatgcccagtagagcagcggcaggttcatcatgctgtcaatgatggctacgccgcgcgtatccattgctgacgagctgaagttccaggcgcggatgaactcaccgcgcacgtggaaccgtgcagcgagcaggttggcggcaagcatgccacgccgccgtccatccatgctgcccgtctggcggtagttggctacgccactaagcagccagatgaaccccagatcgtgatccaccgattcgggatcacgcagacaaccctccagttgccgctcacagctttcggcaatgcgatgtagcgaagccgcagcttcactttccggagcatcctcatagaccagccataacaatccaggccagaaacccgctgtccaccattccggatcattccggtcatacgtcccctgcggggcaatgtgcggaaaggtatccttaatccgctttgcattccgaatcgtcttggcagctccctgttgccacgcttcctcgagccattttaccgacgttgatgtgttcatgaacatatccctcctcgattcaataccggacatctatgtttgatgctccagctcatcctcaacttatctatagcgtcgtatgccgtaactgcaatagctatccgataaatatcactaatcatccacgaataacacttttaactatgcttcgagctgttttgagatgtttggagatctaatgatcctcaacctgaacaccttcagttaacctcgcccaatcggatcgcaaatgacaacctacgtgctccgttcaattcaatccgggcttccttcagtaaaccattacgggaggccacagcctgttcctccagatgaattgtggctccctgatccagcgcagtggattctacatacgccccccgatactccgttcgtacgctatgatccgtatgggtaattaccgcctgttcacgaccatcatggaacatcaacggaatgagtgcccctgctgcagcgatctctccttcgaattcatacgttatagtcagcacatccgcctgttgtacataatgggtacgcaatgttttaattccgggtaatggaccgacccatgtcacggcaaaagcattctccaaggcgttcacgccatcttctgccgctctttcctccagatgctgctccacttggttccgtgtatcagggtccaccttctcatacacaatggaaccacctccctgagcagggtctaatccaacatcccgatcatatgcaccaccggatggaatcccctctgcaagactgtgccataccccatctggtgtcttccaggcaggacagtaactgagcggacgaaccgccccttcggcaaattccgtaaacccggcctgcacatggctggcagcggacggaccaatcagaccaggtaaccccatctgttgaatccgtaccaaaccaggaatcgtatacggatcattcatcgccgtgtgtaataccagttgctgaccaggtatggaagcaatcacagtttcaaaccacccatccgtctgcaaaaccctgctgcctaactcggaaggaaggtatacttcgctcacatcgtctcccggatcactgagacaagcgtgagcaagcgctgctgccgtccacaggttgtaacaggtgtggttggtatatatctcgtacccgtgccgatcttctggcgcgtattcattgcgtacgattttcaaacgtccatcttccatcttccagcgctcaacagcagcaaaacaccgattggccgcacgtgcaaaagcacccgccatcacccgatctcccgccttcagagcctgcgttgcatgtgtggagcatacataagccgccgccgcttcattccactgatgctgggagctgcgaccacgcggtggaatctcacctagcggcgagagcgtcagtaacgagctgaaggcaccatggcgcagctgctcacgtaacgtatcggcagtggttccctcgtaaccagcttcaagcatcaccccaaggtgataacgggtggcaatatcataggaaaatggacaatttggacggtccagcggtccatcctgatacaagccaagggccgtaaaccggggtagatgataggcttccagatatcgatccatccacgcagtaccctcattcgccagctgttcatgccacctcagatattcgccagagatcataatggcgttccagttaatcatgcgattgggattgttcatcttgctcatcgtaaatacataatcttgttcaggactgatcgtcttaagtgcctcagcccagatctgtgcatgttcaggcaggtgtgatttcaacaacatataagctctcatcatgagcaccggaaaaaaatcagggtgattgtctggtgcgctacctttgaccagggcatcaatgctctgtgacagggcttttgctgcggattggagcaaatctgtacgccctgcattaaccagaactgccgcagccatcgcataggccggtgtagaataatatctctccacacccgagaacgggtcgataattgcaccctggctgtcctgatatggtgtgtaagcgcgaacaacactttcaacaagtgccaacttgcgctccctattccagccgtctgccggaggggggcccgcttgttctgccaatgtacggtaatgttcgagttcgtctttccatggatacgtggacgcagatgtatatttactcacgcatgctcacctcggtttctcccattttcggttcaatgatgaagcgtacttcacatatcgtttcaagcggattagggcgttctgtccgaacatccgtctcatcaattgcacctgtccatgatagtgacgtccgatagaatgtgactggaacattgtcatgatcaactgtgtccagtttctccgtaagaattttccactggttcgcatcatacgtcatatggatcgccccatgtgcaccttgccagcgaagattaccgctcttcaccacctcaggttgtactctgctcatccagcgctccactacgctcgaacatcctgcatctgaatcatccaccgaagagaatcgttctgccgaagacaccaacctgctcttccattgaaaacggtcaatgagacgcaattccgctccattcccgctcccgtcaggagccatcttccaatgaaattggcgcgtataacgagccagtgaagctgccccagagtatgcggatgtcagatccaatgtagtatccagctcaccgccaccctctgccagctttgcctctaacacatgggcttgcgcttgccgaccggagcattgctcctggccttcaatgagcggaacgttatgcccggatgacgagatgtggaacagttgctctctgcctagcgcaaaatacgcttgggtatacaaccctgctcctggatcacacagaatattctcaccaccgcaatggataatgaactgccccagatcattatggttgtgaggttcatcgttatgcccgcctttaatggaaatagccacatgaaggggtgagccgttcgcatgttttgtatccggagaatcgaacgatccttttgcaatcatccatcccagattttgaaaaataaatcctcgttcagcctgcccagaggcaccttcatccccgtacactgctggatcgctccacatcacgttccgcaacagatgagcccagcgatgacagggatcatctgtaagcagtggaatatgaaacggaagatctatctgcaacccaacccgggacgcgagcagggaaagcaatccagaagggatctcttcctgctcgacactgtccgaataattcacatatgtgccacccgacagatgaactcgcagtgggaaggctgcgatagctgttattttggaacccgtcagtagatctagttcgccctcactgtactcacgaagcatctcggtataataggtgaaataaccgaatccatatacccaatatccgatgccttcggcacagccgccatcctcgccatatccgctcaagaatgcgttcatacagctgactgtttggcagatcgattctcgtagtgttggctcatcttccaacagcaacaatgcagccataccacagcatccaccacagactgccgaccagttgtgatccgctgtctgccagtggaacttccgttgatcccggtaaagcggagtgaagattcgccgttctgcttcagacctgatccgttctatgacaaggcgattcagccgctcggcgtgaatggtcacaatctcggccagcatatgtaccgtctctgctgcgaacagatcgatgttcccattcacctggttgacctctcccgtacccagatgcgcgggcaaacaccacgtatactcaccacacacgtcccacaacatttcttccagcgcttgcagtgcatccggcctagccgtgtccaaggcgagcatcgccacagcagcaagtctgccccttcgatcgaaataaacctcttcataggcttttcgctcacccctatcgctgaactgtcgatatagacggaacgacaaggaaggcatgggttctttcaaggcacgttcaccgtaagccttcaagtctgtgtataacgtagccaattcaggccgggataacttctccaagagtctgtcggcacttaaggaactcaatgctctgctctcagtaccacgttggtttatattttcattttcgacttcgtgaatggaatcttccactggattcaccactcttcgttaatggattgtcatgcccatattataatgtaatcgatttcattttaccggatatgatagcatttttgaagaattatccattagaaccctttccacgacgttacttccttctccttcctaaccaaaaaaacgaagaaccttcgccaggttctccgttgcattctgcctgtcaccacaggctttttatggttatctcatattcttgactatcttatatcctcatcctcaattaatcctgaatacctataatgctgctgcccatatcctagctgtccgctgttgttattacacaatcgcaagcgaagaattctgtacaacagacaaccattggcgtgcaatcagctcatgacctgctgcggttgggtgtacgccatcccataaccagtacgctgcatccgcctgcttcagagcgtcattaaacgtctgctgcaatggcacccacacagctccaaattcctcagcaagaccttgggccagcttctgatattgaccgatatactcttcccaggcttcccatttctccgcagttgctccggttctcagaataaacggctccatcaaaatcagccccgtatccggcatcacttcccgagtttcttcaagcaaatggcgatacgcccgtccgaaacgatccgttaccccgctaggttcaccattcatcgtgcgccaggcatcattaaccccaatcaggatgctgatcaggtccggttttagactaatggtatcctcattccagcgtgcgtacaggtccgatgcccgatccccgctgatgcctctgttatagaaggtcttttgcttgcccgccagttccatacccagtttgctggagatcagatacgcatacccgtgtccgagaaaatgatttggatcatcattgcgtgatcttcccccatctgtaatcgagtctccctgaaacaatataacggatggactagtactcatgattgaaatcgttccttcctcttgtgaaaatagaaacactgaacacctcagtctccattttatccctttcggtcacaatagaaaatagcgttttcattactgagtgtcgccatcttatgaatctcctagcaattatccgatccaatatcgcagtatcatcatagccacaataccgaccaatacggttcccagcagactgcgtgtccagatagctactgcaatcgtaggcagggatgcccacagagctgcattgtgcgtaatcggcaccaactggttgtccgacatgaacagttcctgaccaatcagcgctgccatgaccgctacgggtacatactccagccagcgtaacaaccacatcggaatctgtatcttgctgaacagcatcagtggcagtacacgcgggataaatgttaacagcgccgaacccataataatccagaatacatcccatcttacttccatcgttccatgaacactcccatcgttgccgcaatgaccgcagccacaatgacactcatgctgccaagtgaagccatgctggcgaagattacacagaccacggtgataatagccacattaatgtgtatttttttgtttttgcgatgcaccaactggagtacaaccagtccaataaacatcgctggcagggcataatccagacccagtcgttccgggttagtgatccagcgtccaaagtacgctccccccatattagccacgaaccagttcagatatgcggtaatattcagaccgtgcatccagcgttcactgagcctttctctgccaattgcacgtgtcatcgccacgccgaaagactcatcggtaagcagtgaaccaatccacatatttttaagcggggtcagatgccgaaaatacggtgatacagctgcactgagcagcaaatgacgaagattcacaaaaaatatggtgaacatgatggctattgctgatccattcgatgcgagcatgcctgctgcaatgaactgagccgatcctgcatataaaatcaggctgagcagtgccgtttccgccagactcagacctgcggtcatttcaatgacacccgccgcaaagccaatactcaaataaccaagcagggttgggatacaatctttgaccccctgcatgaatgtagcttgatcctggacctcttccatgttctcctgtccagatatctgtagtgtactttggtccaactgccgtacaacccctctccaatttcagtccccataaaccgatatatatggatgtagatccatccaggtccattcttcatgaaaacaacttctttgtgtattcaacatgcccagttacatgccttatggatttcacattttgcataattcatttcacattaattcagaaatataccacaagatgtgcactaagggagagacagattactttttatagaacagatgtaatcctaaatacctacaaaatccaaaaaaaatttcgcaaaacgcataaattatgttgaataaacgcgaaatttgtcatacgatagcaccagaaacttctggaaaggatggaatgaaatatcttttaccagatgggcttgtccactagacatggggatgggttacacagagggggaatgtgtatgaaaaaaattcgtaaacaaggggtcaaaagaacaatgcagatgagagagaaactaattttgtcatttgccattgtattgctcattccaaccattagtctgggcattatctcgttccaaacagccgatgccaaggttgaagagaaaatgtatgagaacgcgatcagcagtgttactgtgctcaaccagaccattgaccagatcattggtgcaacacgcaaaaatgttgatttcctggcaagtcagctggatgcaggcaatgtcggacccaatcagggtgacgaaacagataccatccgtaccttgctcgacgcgtataaggaaacccatgatgacgtggaacttgcctctctcggtaccgatcagggcgtgtatattaactcccctgtaactgcggtgaacaaagaaggatatgacccgcgcgaacgcccgtggtatcaggctgctacgcagaacaaagatgtccctaccgtaatcaccccctacttatcaagcaataccggcaatgttgttgcttcggtagctcagacctcagcggatggccatggtgtcgtctctgtcagcctatcgcttgaagccctctcgaagacggttaactccacgaagattggcgagaagggttatatctatatcattgataatgccaataaaatcattgtacatcctaccgaaaaaccggggaccgaaggaaccatggcaccctataaagatattttcgcacagaaaaacggaagtctgacctatacactcaatggaaaccaggaacacgcctttttctccaccaatgaaacgacgggctggaccgtggttggtgtcatcgacagtggggaagtgacggcttctgtccgtccgatcctatacaccacacttgttgttgtagcgattgcaattgcggtgagctccattattattttctggattgtgcaatcaatcaccaaaccactgaaccgcttggtgaaagcatctgacgaaattagtaatggtaatctgaccatcgaagttgctgtattgggacaggatgaattcggcaagctgagcaccagcttcaataagatgagcgaatccttacgaaccgttattcaggacgtgcgacacacggctgacgagttaaccgcctcatccacacaattggcagtcaactcatcggagacaaccaaagcaacagagcaagtcgccctgatcacggaagaatccgcagctggacttgagaaacaaacaagcagcctgaaacatacggcactacagatgaatgagcttgctggaggtgtaggacaggtaacgaacagcacacagcaagtatccgaagctgccatgcaagcaagtgagctcgcggataaagggaatgcaaccatgcagacggccgtatctgagatgagttccgtgagtcgctttgtgcaaggtatggcagatactgctggacgacttggacagcattccacatccattggtgagatggtatctgtcattacagatatcgctgcacagaccaatttgcttgctctcaatgcttctattgaagcagcacgtgcaggtgagcatggacgcggcttctccgtggttgccagcgaagtccgcaagctggcggaacaatcgagcctgtccggccagaagattgtagagatggtcggagcgattcaacaggagatttcaatggccaatcacaatgtacagatcgggcaacaggatgtaagcaacggcattcgtgccgttcagtttgcagatgaagcttttgcccagattagtgaggctgttggggtcgtcaatcatcagcttgagaacattgcagccgcctcacaacagatgtctgcaagtacagccgaagtggtgcaatccattgatcagatccacgccatatcggaaaccaatgccgatggaacggagaacatctctgctgctacggaggagcaggtggcttccatgcaagagatatcatcctctgctgattcccttgcccatctggctcacaagctacagaagctggtggaacaattcaagctgtaatcgttgaactaaagattgtttacactaacactacgatgacagaataaccttccaatcgctgctttcgtacagaagattagtccaacttatttaataaatagtctgtaacatcaaaatcccctttgccatcacgttggcagaggggattttggtaatgataggacgtgaaatatggctggatcgaaggcgaaggactcttcttcttcctgatgagcatcatcgatgtgttcaccaacgtgtctcaacttgagatcaatacttggctaaaatattgcattttgcggacgaggttaagcgcgtaatattcttgccctcggttcctttgttttctgcatactttgtgcatgtcttgttttctgtcagttcttcactttaatagaccgcccgatgaattaattataagcagcctcccacttgaactgtatccccaattgttattgatgtctaacctatgtacaacaatttattgggtacgttaccgatagaagtccaccatatctccaaacagccgtttaataaattcgagctcgctttcgttatatctttccaaaaattcgtacattctttgcttttccttcgtatgaagctcatcatgagcagcaaatagctttttgccgataggcgttagccgaaaatacacttcctttttgttgtcgttgaactgggattttcgcacccaacctgcctttagtaatttatttgcgatcttggaggtatttcctttacttaaattgattctctccgcgatggaagtgagattgatcggctcctgctctccgatgcacgcaatggtgtgcagttccgtcatattcaagctgaattctgattcaatatgcttccggatatcctccaggtatgaggcagttattcgggtttcatattgctctttttgctcaagaaactgaacgaaaaattcatgaatggccgttttgtttttactggcagtatccatcattatgctggctcctcgacttatttgttttattatatcatagattgttctctgagaaacatatgggcatacccatattgggattggggttgacatggtaaatagaaaccaagtaaagttatattgtttcgtatgaaactaaaattatatataattttcattacacttgttttaacaggcaataaaaaaggttctaacgaaacaataattgatgaaggaggtttgacggaaatacttgtccacttttcaagaggaaatttataaaatatggaaatggagcatacctgcctatggaagtcgtaaatccgaagaccttgacggataaggttacatctgtaatttctcatgtcgtggtgactactgcctccaaattggctttcatctcaggtcaggtttctgtagatgaaacaggattgttggtcggttcaggggactattacgcacaagcgattcaagtgttcaccaaccttaagtatgcattggaagccgtgcgagcggatcccttgtacattgtaaaaatgaatatttttgttgtaaaccacaacccggaattgatttcgattatttttgaggcaggatttcatgtgtttggccctaactggccgaagacagcaagtacgtatataggcgttcaagcactagccgatcctgaatggcttatcgaaatagacgctatcgtgattttcccataatgtataagaaaagagggttttgatatgaaatatgaagtcatcctgattggtggcggacctgtcggcatgatgctggctggggaattggcattagccggtgtaaaggtctgcgtcattgagcgattaaaagagacaaccccttattcacgcgcgcttaccgtacatcctcgaactcttgaaatattagatatgcgtggagtgaaatcacaattaatcagtcaaggccgcttactttcgagaggacatttcgccggattagaaactcctttggatttcaacgttttggattcttcttccaatcacactctatttttaccgcagagtgagacggagaaggtgttggaggaatgggcgcttagccttggcgcagaggtctggagagaggttgaggctctatctgtacaccaggatgaggatggggttgacgttaagatcgcaggacctcatggagaaacaacgttaagatcagcttatgtggtaggtacagacggagccagaagtttggttcgcaagcatgcaaatatatcatttgaaggtacagatgcgaccttcacggcaattctgggggatgccattctatctgatttggctcctatgagtgtcatatcccggattacagaaaaaggattggtcagcatcatgccgatcaatgatcatatgtatcgggtcttgatgatcgatatggagagaagtaacatctctaaggatgagcccgttacattggaagagtttcgttcatcgctcatccgtacgaccggaagcgacctgggattgaacgatgtgaaatggatgtcccgtttcggaaatgcgacgcggcaagcgggacgatatcggaatggtcgattgttcttggcgggagattcggcgcacattcattttcccgctggtggacagggaatgaacgttggcttacaagaagcgatgaacttaggctggaagcttgcaggagcaatcaaaggctgggctccggactggctattgaacagttatcatgccgaacgctttccatggaatacggccttgctccggaataccgaggtccaaaccttgcttctggacgtaactccccctatcacggaacttcgaagcatgttagctaaactgattcaaataccggaggcaaattatcaaatcgccgcacaagtttccgcaatggatgtacattatgctccagacgccgaagcacctccccatcctttaaatgggaaacgttttaaggatctaagcttaaagctgaaagacgggcaattgatcaacgcctatccgttactacacaaaggtacttttcttctgctgcatttccattctaatgaacagaatagcggtcaatgggaatcgtataacaaccttcaagttgtacatgcctctttggctgaggctgacgcagattggaacgacgtccacacggcgcttattcggccggatgggcatattgcctgggcgattcttctatccgatccaaatccaatgcaaaccataaatgaaggaatcactcgctggtgcggagacattaccgtgtagtcattcgttcgaggtgcacaactgacttcccatagggtgaacttgtatttggggcgtctaaatgaactatcacggtatgctgcacttaaaaaaacgcaatgcaatgttctccatgagtatgaaaatactgctcaagcgttattcaacaacgctcaggcggtattttcatttctgagaaagaaggtactttacgctccatttcgttccgcagctgcagatcggcgacgcagggacaatgaaataatagccgggatcagtccaatggcaaccaaagctccaccaagcaaaccaacggatgctagcgagatgctttctacaacaatacctccgattacagcctctacagctgcccaactgcacaatagaattattcgaactcatgatgatccctgaagcctgaaaaaattaagcaattctatgcattcgcttgaataagaggggtttggtccggaataacggagttaaaccgattgctttttatctccgtggtacccttgatctccgtagggctctaactgttcaaaccagcgattcagacatttggctagtgcatctttgggatcgtaatacgggttatcatcttgtttcaatgtctccagcacctcgatcacaaacgcattctctccatattcattccattcagcctgcaatcttcgattcaggtggctacccatctgtaacataaaccgttgtccgttaatggttttcaggttaagtgtgctgtcgatataaactttgccgttacgttcattccgaatttggtagacgcccgcttccgttttaacttctttggcctgttcctgcaattctttgcgacgattcatcttctcctgctcccccttttctttgcgctcctgttttccaactttggcgctctgttgatctgtgtggcttcccaaccaatactgactgccgtctggctcacgttccagcaaaccatagtcgacgagatacctccgtatttccacgtaatcatcatgaacttccttcagcagctcattgacctgtatctcggaatatttgcgctctgtctcaaatcgtttggcaatttcgatgagcacaatatatttatgcttttgctgcatatgaaacgtcgtcagccgaccgccagtaccctctggaaaatacttgtttagcaccttctcccgatcctgttctgtaatatcaaatgaatcacgacggatcgtatgtccatgccttgtcacaggtgatacccattcagccggggcttgggtatctttactcttgagaagctccattaatgccaggaatatcttggcctgccgttccttctcctttaatacaaaccgatgattccggatcgtggaagcactcccgatgccaagggtcttctgtacttcagcatccttcttgccttcatagaattgtgacaacaagccccgctggacatcagacaatccggttacgcttttatccagctccagcaaatattcaaataccgatccatgaaccttctcaatgtgcactcgtatataacgggctgcctcatagagcactccttcttcagggtagataatccccgattccgtcctgtatccgcagcagacacatatataggcgggaccgtcctccatataaccacgcttgatctcttccaatgaagctgtttgcaaccaggattccgatgatttcatgtaaaaactcctttttatcattgttatggtcattccaaccgtatattaatcaaatattttatagttatgtttgtttatttatagatataatatatttttgtttgttatatgtcaatataacggaaaagaatgctgtgtttaaagacataaaggatgccccttgttcaacagaaaaaagactgcagggtcgcaaccctgcagtctcatcgcagaaagggcatttcagcaccttccataagcatttatcctcaatcattgtctcatttcaatctctgttacaacttaaaccgttcaatcatgctttgcagatcttcagccatacgtgacaatgctgccgaagaagctgcaacctcttccattgtagccaactgctcttgagccgccgctgatccatcttccgttccagaggcaattctgtccgacagaaccattgtatcacttactgccttgttgatatgactcatgcccccatcaatttgacgggaagccgtggatacttctccagcttgtgcagccaccaactgtaccgcagtacgaatgttattgaatgcttctcctgcttctgtaaccatctgcgaactcttcaccataccttctcccgtacgggcaaaagtggattgcaccgcattggttttctcctgcatctcatgcataagctcattaatccgctcggctgaagcgcctgaactgtgagccagtgtcttcacttcgttggctacaaccgcgaatccacgcccttgctcgccagctcttgaagcttcaatggatgcattcaatgcaagaatgttcgtctgcttggcaatggccgtaatctcggccacaatcacaaggatctcttcatttttcgcgcgcagatcctcaatgaccacagacatggctttgctctcatcattcacctgctgaatatgggtaaccgcttcttctactgtaaccatacccgcttccgacttagtggatgcatccagagcgatacgagcggtgtcttcagcacttgatgagatctctttgactccaatggacatttcgcccacgagttgacctgtggcagcaagactattgttctgcaaagtcgttcccgcagctgcatcctgcatcagttcagccacctgttctgtggctttggatgtctgctcggaactcgccatcagttcttcagaagatgccgccagctggctggatgtatcatgcacctctccaagcacactacgcagggaagtcgtcatcgtgtcgaagctttccccgagctgtccgaactcatcccggcgctgtaaacctacccgaacggtgaggtccccggcgcttactttggatgctgcctgcgttaattgcagcaatggccggtgaatgctgcggataatgaatataagcagaatcaacccgataaccaatgcagatgccacaattgtaattgaacggatcaaaataggcattacggcttcacttgcttcggaaggaaccatctcgccaacaattttccagcctgtcaccggattggtgaaatacacagcttccacttcgtgaccatcatatgtatacttcaccgttccactttccttcgtatacatctcattaatgtagctttcatccgactgtgtaccggattcaatattgtagtggaaaaggaatttacccccgttatccagcatgtacagtttgccttctttaccaatacgtatctgatcaacggattctttcagatgattgagactgacattggctccgaatacccctttgccgtcagccagcttgaccgctgcggtcacaacccattcgcccgtcgaagccgactggaacgtatccgagattaccggttcatcctgggacatgcccatcttataccatgaacgttctcgaggatcataattctgttcctcggattcaggggacttcatccagctaccatcttcggaacctgcggtaagtacacccagttccttatgattctgagacatccgatccatctgcctttgcagtgcaggggatttagtaataatatcgtttgaagtaatacccgcagccatctgagctgcgttatccttctccatatcgagcatttgatttatctgcagactaagcatttctgttttggcctgtgcggaacgaataatctccattttaacctggtcagcagctttttgataagacaaccaaccaacagtaatgctcggtacaatcaggaacaggagtaatgcagcgatcaggcgtttttttacggttaaagtaaaccaatttcgaatccttttcttcatttaactatcccccatcataatcttcacccatccttttatcggacaatcgctgtaaaaatattatgtatagatactaaattagaataaatttaatcttttcggtcagtttagatggattcacctaatccttctattcgttttgacccccttagcgagatcgtttacaatgctcataagctggctattcatgaaacgattggaaggagaggattcaaatcttacgcaagtcaaatgaaagacaacgtatttccacggtatattcatccatgttccgcattctgttagcgctcatcctgtgtgcaggcccgattctgggacaagctggtattacggtatccgcagcgcaggcgacgcaagcagttcacattgaagtgaatggtgagcaacaattctggaagaacgcaccacttatcatcaaaggttcaacgtttgttccactgcgggatgtggtcacatcggttaaaggcacgttgaaatgggataatcgcaccaagacggctaccattaccgttggcagagacaagctgatccatcaggctggcagcaattccattaaggtaaaccaggtcgatctagctacaggtgtgaattcacgtaccgttaacggtacgttgatggtacctgtccgggccatggctaatgcaatcaaagcagacatcaaggtccaacgtacagccacggggcagatgagtgtaagtatggtcactgatcaagtcagcctgctgaacagcgaggttgccagcgtggatacgtatctgcgcgagatcaactatccaggtatggctctgatcgcccgcgatggtgaagtacttctaaagcaaggctacggacttgccgatgaacagacgctgaatcgaccggatcaaaagacccgaatcgcatcgctgagcaaatccttcacggccgcgtccattctgagtctcgtggaggatggtaagattaatgtgcaagatccaatctccaagtatatctctggtataccaaagggagatcagatcacgctgcatatgctgttatcccagacttcaggtctgccatctgcatttggtcggggtgaaggaacttctatggaagagactgtagaggagattcgccacaaaacgctgaagtttgaaccaggaagtgcctatctgtacagcaacagcgggtatgttttacttgcatacgtcgttgaacaggtctctggcatgagttatgccgactacgtgcaacaaacgatactgaaaccacttggtatgaaaaattcgggagaggcctcccgtaaagtgcacacgattagtggttttgttcaagaagataacgcatgggtaactgcgccttactatgtgtctcaatccggatcaggaaccatctattccacggtggacgatatgctgaaatgggatcgtgcgctgtatacggacaagattctaagccaggatacgattgaacagatgtatgagccttattctgataaaaactatggctacgcctggattctcaaagagaatggcgcaaaccgtaccgtcttccacaacggtagtggtggcgggtttgccacagccttttcacgtaatctgtccgatgatatcaccattatcctgcttggcaaccacgcaggtatggacatgacttcacttttggatgaagttgagacacagacagccaaagcactgcaattgcaataatctataattaatagcttataatgagcaaagagacggtcctttaaaggatcgtctctttgtgttgtatatgttctcattttaacgactcacacttccgtttcgctcaacccacaatccatctcttctccatcctgcaaaaggaagatttactcatattcttattactgtctaggagacatccgctctttcatcatctgtctgctttaatgttacaggaagtttccccgcaaaaggaatgcgccccatcagcgcctgagcaacgctatccatggcaagtggccggctctcgtaagccgctacatagacctgggcatccggaagcgccagcagatcatagggacttcgcattgccacaacagccagtggtttgcccaattgctgtatccaaccaatcagtctgcactgtggatcgccggaggggcttcctgcattgtaggttcccaccacaatctgccgaatgtcatctgcttccgctgcctgaagcagacgtgcggaacgaatggcgacttcctcgggcgtgaccatcagatcgacaacatccagaccatacatggataaggctgagcccaaggtgaatgtctgattcagatgttcgtcagcaattgtcgtcacggacgtggcaatcgttatgaccaacgtgcgttccggctttaaaggcagcatattcagctgatcgcgcaccagtgtgatactgttctcgctaatacgacgggcaacctcttggtgtaatgaactgttgcgctccgacccactggatagagcaggggcgtttgatacctttggcaatgatgcattcgatactacactgttcacttcatcattacttgcgccgcccattccactctccaacaaaccacgcttcgccttgtacatcagcaagcgattcaccgactcatcaatacgtctctcgctaatccgcccgctcctcacagctgctaacaacgcatcaaatgcctctgcctgaagcttagccgtatggctaattaacaccagatctgccccggcctctaccgccattacggctgcatcgacagtgccatagttcacggcaatagcatccatctccatgcaatctgtcacgatcatgccctgataacccagttcctggcgaagcagaccgcttaatacggtttgcgatagcgttacgggcagacgctctggctccagtgcagggaaataaatatgcgccgacatcatggcatcgacaccttcggcgatagcggctcggaatggaatcaactccaggcactctacccgttcccgatcatgagtgatgatcgggaggtccagatgggaatcggtatccgtatccccatgccccgggaagtgcttggctgtcgctgcaatcccagcgtcctgtattcccgcaatggttctggccccatattctgcaaccgattgtggagattcgccgaatgatcgcacaccgatgaccggattggccgcgttattgttcacatccaataccggagcaaagttcatgttaatgcccatggccttcagctccaacccactgatataggctgcctgatacgcatcgtcaatggaaccggcagcggcaatggccattggtccaggcatcaaggttatcccttcggtaattcgagcaaccatgccgccctcctgatcaatggatatccagagcggcacattaccgctgcttttggcaatctgctgtaaccctgacgataaccgctctacctgctctggcgactcaacgttgcgagcaaagtagattacgccaccgattggatacattcggagaaaggattccacatcgccagcagcttcggtgccatgaaagccacaaagcagcatttgcccgattttctcacgcaaggtcatctgtttcagcttcgactggtataactcttttggcccactcatttcatgcctccctccgctaacaaacatccgttcattcatataacaaaaacggctttcgccgctccttccattccgctgcctgtacattccacgcgtccattaaacgaatgaattccgcgcggtcatgaatcgtttccctggcttccttaccccctgccagcaggtcgataaagtaccttgaacccggctctggtggctccagccagcagaattgctccggatagagtgacaccagttcatgcaaaagcaccaaccctgtctctaccgcccgaaatttcctactgtccgttacaaaaatccttacgccaccacacagctcacctgcgtgtttggagaatgttggggacatgtacactgaatgcacatgtacaccttccagcttgtattcccgaaatcgttccgccaaacgctcaccctcaatccagggggctccaatccactcgaatgggcgggtcgtgcccctgccctccgatacattagtgccttcgaacaggcacgtacccgcatatacgcgcacactgtccagcgtgggcatattgggagagggtaatatccagggaagcccacaatccgcaaactccatggagcgctgccatccttccatggcaaccacgtccaatttgcaaggtacatccatctcgctgttgaccatcagggcgagttcacctatcgttaatccggtacgtacaggtatacgccaagcgccaacgagtgattcataccccgcgttcagcacacctccttccacttcgtttccacccagcggattgggacggtccagaatcagcatacgtttgcctgcttcagcacaggcatccatcatatggaacaaggttgaggcatatgtgtaataacggatacccacatcctgaatgtcgaacagcaccgtatccactccagccagcattgcaggcgtaggtttcttgtaatctccatacaggctgaacaccggaatgtccagatgtggatgaagcatgtctccgaatctgacacccgcctgaagctctccatacagtccgtgctcacaggcatagagcgctgtaagctcggtattagccagtccagcgcacacatctattgtcgatacaaaatccgctgtaataccagtcgggtttgtaattagaccgattcggttacccgttatccatggatgcgataaccctctggacagaagatcaactcccgtttttacagccgggatctgctcggtcccattcaactgacccatcacacattcccctggctgacccagcctgtatgctggtgatcattaccgcctgttacgacaggctcttcttcaggctccagcacattaagagcaaccttatgttgatagatggcaaacatccctccaaacagcgctccgaaaccaacgacagtcagcatcagcagagccgtcaggcacatggcctgaaaacaagcgcccatcgtgtaccccgggtgacggaagaacagctttacactttcccccatcgcctgaacgatgcccatgtttttttgtaaaacaagctgccaggtatagaactgtgacatcaacgccatgagaacaaagaacgtctggaatacacccactgctgtacctgtaattccaccctgtccaccgtaataccaccaagttgaccatagaatgaagccaagcaccgcgaaaagcacacccaccgatcctcccgggattattcccttcaatgttccgacccagatatccttaagtccattgcgtcgttccttacgttccaatctgtgatgtacggcataacagaccccgaacaggatgggcatatacatcaaggccagaagcagtatagcgatcggcagcggagcaaacatcagaatgggaatcaaaacgatggagctaacgacactgtacaaggccaccgaaataatatcccgatagatttccgcacccgacttgatcaatacttcactcagcttacgcatttttattctcccctctatataagttgagctaaacattttacacgataacggagaaaacagaacaaatctggagaagcgaagcgttcgcccacaagggctgtcttaaaagggctacccatttcggttggcttggccgcaccaccggtcagtatgttgtaccaaacttgcaacgtgctaacgaatttaccgcaccttaaacgacggattttcgaggcatgccaattgtaacgaacttcagccccgcctactcccgtccaatcgcaagctccgtctctggatcaaaaaagtgcgccttacgtaggtccagcacaaaatttttgtccatacctacataagcatgtgtttccggatgaaccttggccgtaacattacggggaccggaatggaaatacaccaaattctcggagcccagatgttctacaacctgaactcgtgcctgcagcatatggtctgttgggatattcggagcgacatcgtcaccaaaaatatgctctggacgcagacccataatcaccggcttgccttgatgactctgaagacgagcgagtacatcttctggcaaggtgaatgatgcaccgtccacgacaacctgcgtgccttcaatccgggcatcaatgaagttcatcgccggagaaccgataaatccggcaacaaacatattccgcggactcgcatacagttcttttggtgaagccacctgctgaatgtctccatgattcatgaccacgatgcgttccccaagtgtcatggcttctacctgatcatgcgtcacgtacacaatcgtggcaccgagacgtttatgcagctcacccaactccacccgcatctgtacccgcaacttggcatccagattggacagtggttcatcgaataaaaacacctgcggatcacggacgatcgcccgtcctaccgcaacacgctggcgctgaccaccagacagctcgcgtggtttgcgctccagcatcgcttccagtcccagaatggaggccgcattctgcacctgttcatcaatgtaggactttggctttttcaggtttttcaggccaaaggacagattttcacggatggtcatatgcggatagagtgcataatcctgaaacaccatcgcgatatcgcgatccttcggatgcagatcgttaacaagccggtcaccgatcacaatatcaccgcttgtttgcttttcaagtccggcaatcatccgcagtgacgttgtcttgccacagcccgaaggacccacaaacactacgaattccttatcttctataacaaagtccgagccggccacagccgtgaacgttcctttatgatcgtctttgaattctttgcgcacttggcgaaactccacgcgtgccataggtagatccccctttacgttgtcgcttgtcctgaactatataagttcaactaacgaatccttacactggcactccgatgacagaacaaccttccgatcgctgttatggtgtaaatgtttagttgaacatatattggaattaaccttttactgcaccgatcgtaatgccttgtaggaaataacgttgcagtgagaagaacaaaataatcatgggcagcgcacctattgttgcccctgccatcattgcgccgaagtccgttgattcggcaaatacgaatgaagccagccccacctgaatggtacgcatctcgttggaattggtaatgaggaacggccagaagaattcgttccacgaagccacaaacgtgaatatcgccagcaccgcgattcccggctttgccatcggcagaatgactttccagaagatgccgaactcactacatgcatcgatacgtgctgcatgtatcagcgatgtgggcagcgtagacatgaactgtttcatcaagaaaatgttgcccacactaacggcagcaggtagaataatggccgtatacgtatcccctagatcaaacacgttgaccatcagaatgtacaaaggaattagtgtcacctgcgccgggatcatcattgtcccaagcaacgtccagaataccgcctgactacccggaaacttcagtttggcgaacgcatatcccgccagggaggcgaagaatacatttgttacggtcagaatgatcgagatgagcagcgagttgtataaccagcgccaggcatcagttttggcaaaaaagcgctcatatggtgataacgacaactgctccggaatcatctgtggtttaaacgaagccgacatcgcgctatcctgcaccgaaccaacgagcatccaatacatcggaatgaccgtcaccagcgcccagactaccagcagaatggatgcaacaacgagcagaatctttttctgtgttgatttcatggatttcattcacccccggatgcttaatgcaacgtgctctaatagtccgtgttttgaactacctctaatactcaatatcgctggagaaatatttgaactgtatgacggagatgacaatgatgataatcgccagtacaaacgactgagccgaagccaatccgaactcatagaatttaaatgccgtttcatagatcagataagcgattgttgttgtcgcaaagtttggtccaccctgtgtcatcagatataccgagatgaacacctggaaagacgtgatcacacccgtgacgagcagatacagcgtcgttggtttgagcagcggccatgtaatcttgctgaactgggtccagccgctggcatgatcaatatccgccgcttcgtacagcgatttcggaataccgcccatggctgcaagatacagaataatgcccgctccgtgcgatccaagccagttcatcagaatgagggaaaaaagtgccgttcccgactggcccagccagattaccgggtcaaggccgaacagaccgaggaaacggttgagcagtcccgaatccgtcgggtcaaagatcgccagccatacaatggagatggtcaccccggaggctaccgcaggcagatacatggtagctttgaaaaatgtctgccatttgcttttcatctgatagatgaaataggacagtacaaatgtaatgagaatattgacggggactgtgcctacggtgaagatcaccgtatttttaatcgacttccagaacgtctcatctttcaccaaccgctcgtagttatccaatccaacccacgtcgagttcataatattgtatttctggaagctcatcacaagagccgtcagaacgggatacagtgtgaaaatgagaaacagcaggacaggcgccaaaataaacaaatacgcccacccgtagtctcgccaaaaccgggcaacccgggaagtccggggcacggacgattttggcgcaagggcggtctgcatggcgaatcctcctctcctaatcagtgtggttttacgttatgtttgattgtccgagttattgtccaaacatctgctggcctttgctcttgaagtcttctgcgatctgctccggtgatttttcacccgagaacagcgcctgaatattaggcttcacaacctgttccttgaattgtttttgctgagatgctttgtcgatatccagttccagtacaaccggcatcgcgatattctctgccatgacttttgcagcagccagattatccggttgaccaagctcttttcctttaaacagatccacctgggactgtcttacgaatggaagcgccagttcattggccgagttccctgctttggcaccactaagcgcctccatcaccaggaacgtatttttggcatgctgttcgcccttgtcctttttctgtttgaaggctacgtacccttcgccacccatcgttgtggccgcaggttgatcatcattatgcggtacaggcaacaggacaaaatcaatcttctctccctgcaccttgccatcatcgatgtccttattgcggttctgaatcatcacatcataataaggaatcgctttggagatgatcgccgtttcccccgcgtagaacatatccgtccgttttgctggagcaagagccgccgtttccttcggcatatacccttgatccatcaggtttttgataaaagagagggtatccagaatgcgcccatcattccattggaacgtgccgtctttatcaagaacatcgatcatcccgttgttacgagacagcatttcaatgaagtcaagcgaggttccgtcggtaaccagtgcatattgcttggccccgccatccagcgttttggtcagcttggcagcagcatcgttgaattcggaccaggtccagccattttgttgaatggacttccaatcaatgcccgcttcctccaaaatgcgtttgttactaccccatgcccattggaattgatacaacggtagtccgtactgtttcccctgaatctggcctaaatcaagcggacctggcaggtagtcgtccttgatctcaggtgtcaggtagctgtccagctcaagtgccaatcccgtattcacatatgtgccgtctacgctatgaaagtaaagatccggcgggttacctgcgttcagagcgacatcgaattttttgggcccttccgcccaggaaagcatttccgtcttcacggtaatgttcgggtgttctttattgaaatcagagattagatccttcagttcatcttcatatgtgccatgtacaggataggtccataccgttaccgtatcatcggcattcgggtcatccgaagcagcacctccgctattcccacaggctgtaacccagaccatcatcaacaacattgcccataccagacccttctttttcatcccttcatctcctttgcatgtcatcatccgattctttcattgcctaaccatgctacccctttgtgatcattcggccttcaaacgccatccacctatacacgcggcagtaaggaaaagcacctcccctgtagattgggcctgccagtcgcaggctaaatctcttaaatgcaatattaacgtcaacttaattgacattaacagtattaattccttccaaaattgtagattgaattcattatatgagttgtaaaataaaaattcaacattattttttattataaaatttaattttactttttcttttcatgcaactatactatgtaaaaagaaaacccaagcaagcgaggtgagccactttgcgagtgtatgtaggcgtagatggaggcggtaccaatactgatgcagcaatcatttctgaatctggtgaaattctcgcccgactcagcggcggtcccacgaatcctcacagcgttacaactgaacaggccattttcgaactgcaacgagtgctggaacagctatttaatctaataagtgatttatcgacaaattgtgagggtatatgccttggtatgtcaggtgtagatacgatccaagaacggcaacttatagccgaagcagtaaataactacatgaagagtcgtaatcaacaggcatcagaaggttgtccagtctgggttatatccgaaggagagattgctctgatggcctctctcggacatacgcacggtgtattgtgtatctctggaacaggttccatcgtgtacggctttacgcgggaaggcgagcgataccgtgcaggaggctggggtcatctgctcggagatgaggggagtggctatcgtattgggcagcgtgcactccaagtggttatgcagagttatgacggtgttcttcctccaacctgtttaaccccgcttcttctaaagaatctgaaccttcgggatatatcggagttaaagacgcgagtgtatcagacggattggggcaaaaccgagaccgcatccatcgcacgcctagctatagaagctgctgaactcggagatgaggctgcccgcgcactgatcattgacgaagcctcacaattggcggataccgccaaggcactgattgcccgtcatccccaatttgcatccactccggttgtcctgtccggatcaatgtttcgatacgctacacttttccgaaatacatttatccagaagttatcaggatattatggagagttggactttgtatatcgtgaagatgcccccgctccagcggttggcgcagcacaactggcaagaaaacgccgttccctgaatgaatcattttaaaagagagaaggaggccatacggatgaatcacatgctgaattcactactaacagaacaacccaatccactaacggatcatatagatgaattgccttcggcagaaattatggagctcattaataaggaagatcaacggattgcggagctcattcagcccctcattccggtcattgctcaagctgcggatcggatcttggaggcgtttcagtctggcggcaggcttttttatgtaggcgcaggtaccagtggacgattaggaatacttgacgcttcggaatgcccgcctacctacggaaccccaccatccatggtgcagggtattattgcagggggattccgggcagtgaaggacccggttgaaggtgctgaagatagtgaggagttgggagctgcggaccttgatgaacatggcttagacaaaaacgatgtcgtggttggcattgcagccagtggacgaacgccgtatgtgctgggtgcgatgagacatgccaaggagatcggggctacggtgatcagcttgagcaataatgcaggcacgccgatgaccctgttggctgatgtgagcattgaggctgttgtcggcccagaggttgtcatgggttcaacacgtatgaaggcaggcagcgcccagaaaatgattctgaatatgctcaccactaccgccatgattcgtctgggcaaggtttaccgtaatttcatggttgatctgaacccttcgaacgagaagcttgttcatcgggccaaacgcatgatccatctggcaaccggagcgaatgaagcggatattgaagaggcttttaccggtgcagacggtcatgtaaaaacggcaatcgtcatgctgatggcaggcgtggacgtaacagaggctcagcaaaggcttgatctggctgacggttttgtccgtagcgccattgcggggccttcctgagccgtacagggggtattattagaggtggtaagagaggagcccaacactagtctgggctctttttttatttttttatatcctaaaagcgggtataattcgtcaaaaaaatcccctcctgcataatcagaaagggattcatatggttctacttcacttgtgctccagaatagcctgtcggctcttctccaaatactccaccgactggttgtaatcccgactggcaatcgccagatacaaaatgtcgatcacattcagctgtgcaatccgtgacgaagttgctccgctccgaatatcactttcggtagaagtaatcatcaggggcacatccgccatactactgagtgtattgctgccccacttggtaatgctgattgtcgctgcaccaccatcatgagcatgcttgagacaggagattacgttcgacgtctcccctgaatacgagatacataccaccgcatcatcctcacgaagcgtcgttgcggacgaaatctgcatatgcggatcggcgaacgaaaagcttgtgcgattgattcgcatgaacttgtaatgtgcatccagcgcaatcaggttggaggcccctactccatagaaaaagatccggtttgcctgatgaagcacgtccacagctttttccaccagacgtgggtccagaatatgaaccgtatccttcaccgactgaatattgtttgcggacacatgctgaataatgctctccatggagtcctggggacgaatctccgtatattgatatggctcactcgtctgcaaatctccggcaatcttcagcttcagctcctgaaaacccgttacacctagtgatttgcagagacggataatggcagctgggctgcctccactccgttcagacaactgggccaccgaggattgaacagtttcttgcgggtgatcgagaatataagctccgatcttccgttcggacggggtcaagtcatccattaatgcgcgtaaacgtacaagtccacctttcatgccttccattcgctcctcctttccgtactgcattcatgtacaagcattttatcttataattccactcgcgtctaatcgaattcctcgcccttccataactgaactcatattaaattcaggtctcactaaagtgtgagattgcccgagattacggcgtgtttcgctccggttactgccggaagtgtattggttcttcccataagtgcctcatggccaagtaaagcaaatccaatggcttcccgagcatcatcgggtataccataatctgccgttcgctccaaacggatatccttcggtagtctctgacggatcatctccattaacgtggcattggaagtgccaccaccgcacgcgagcatggccgatatttgcaccttgggcaggataaaatccttcactgcacgcacgatggtttccgcggtcagacaggtggcagtagccagcgtatcttcaagagataaggaacgctttgcggccatctccatcagtctcactgcatacgcggctccatatacttctcgcccggtacttttcggtggaagtcttttgaaatactcatcctccaaacacaggtctaccagaccctgatcgaccttcccctgtgcggcaatacttccattcggatcataatgctgccgcccatccgttgcctgccgcacaatggcgtccatcaccatattccctggtcccgtatcaaatgccgaaataccttcggtagaagactcggagggaagcaccgtcacattgccaatgccaccgatattctgcaccagccgtccttccgtcgggctacggaacatcagagcatccgcataaggcgtaagcggggcaccttccccaccagcggccatatcccttgcccgcaggttgccaatcactggcagtcctgtccgttctcgaactacagcacattcaccgatctgcaatgtcgataccacatcaatacttgctcccgttggccctggaaatgaagatgctacaggagcatgccataccgtctgcccatgcatgctaatcatatccacctgctgcgttgagataccggcagactgcatcagttccgtaacgctatgcgcataccactccgatacaccaaaatgcgcggctgtcagctcgttgacacgcgccgtcctcggtgaacataaccggatcagtaggtctctcaatccattcgaatacggcacacagacgaaatcaaccagctcgatctgctgtaatgccccgctcatatcggtttgaatacgcaccagtgccgcgtcagttccatcaagtgacgttcctgacattagtccgatgaccagatgctcctgcttcaaacgatacttctcccacatcggatagctgcctgtatccatccacttccaacctcctgcaagacccgatgaacacgtcatcctgccataatttcacccagtatatgatattaaatttcacaagtcaaacattatatgaaatttaattacatcattgaaaataaaaagagagatattcatcccatttgcgatcacacatcatgttttcttccatcaattgataattagatatcagaagagaaacatttttacatttttaccgtttataatatgtagggatattttggaattaagaaaatgatctaatattagtcgaggtgcataatgaagaaaaccattttactactgtttttaagtctattcttactcgttttgctccctaatcagggaaatgccgctacaagcacgtcgaaaatctttatggatggagaggaattagtcctcccaagtgatgtacaggtgacgattatcaataaaaacgtgatgatcccaattcgtgtcgttgccgaaaatttgaaattcaaagtcgattggaaccaacaagcacgcactgtaaaaattcagcaagatcaacagacgatttccctaaccgtcgatcaaaagcaagccatggttgctgacaaacaagtcactttgaacacagcaccgcagattttgaataaaacgctggtggtgcccattcgatttgtcagtgaacagatggggcttaaggtgagatggaacaatcaagacaagatcgtatacttaacgaacactagtaaggaacctgctattgaaccaggaaatagtcctggaaaaggggattcaagctctaccgctcaggttaccgatatccaatttgccaataatcagctcgtgttatccaccgatggggccgttcagccgatagtaacgaccctcaagtaccctgatcgtctggttgtggacttgcccggagccacctttggtgatatctcccagccgctggatcaaggactcaatggcaagttggatgtgagcggttatcccaatgtgacagaagtgagatattcactgttcaaacgagaaccggcacaagttcgcattgtcgtagaattgaataatgtgaagaatgtccagtacaaccagaacgtcattgccgacaaattgattattgatctgaatgttgcgggtgacaatgtcacacctgctccagtcactccagtaggcgactcaggacgcaaggttgtggtcatcgatccaggacacggtggcagtgatccagggacgatcagcatcacgaacaaacccgaaaaggaatacaatctggcattagctcacaaagtacaagccctgttgctcaatgaacccaatatcgaattggtgatgactcgtgaaggtgatacctatccgacccgccctgagcgtgttcaactcgccaatcaattaaatgcggatgtatttgtatctatccatggcaatagcgtgaagtccgccccccaagccacaggtacggagacatattattatcaacgcagtaacagcaaggaattagctactatcattcatcaacgtttggtgaaagccatgggtctcagagatcgtggtgtgaaaaatggcaacttggaagtaatccgagacacgaccatgcctgcagtgcttttggaagtaggattcttgagtaatgtaatcgatgaagaactgatgtcgtccgaagttgttcagatgaaagccgctcaagcgatagccgatggaatcaaggagtatttgggcctataaatcatcaaataaatcagataaaggaagtgtttctttgaataagaagctaggttgtgcacttatattatcatgcttgatccttatcggagttggatgtgcccagaagccagtgagccaatccggttcgaatgaacctgctgttcagggaggacaggtgcaggcaccaaacccatccgaaacggaggtggatctgggcacaatgaatacacaagtcgttgatgtatatttggcagactctcaggtacttgagctagagaaaacagagcaggaaattgagtacaaggatgactccgaaaaatatgaaaaaacatttgcagcgttgcaaacaaacaccgattcagagcttgtttccctctgggagcaggtggaattgctctctgtccaatatgctgagggtacggtaactttggatgttcatatccccgctgaagcgaacctcggtaccagtggagaattgctcgcattggaagctttaacaacaacgatgtttcaatttgatgaagtgaagagtctggatatactggtggatggtgaagccgttgatagtttgatgggtcatgccgaactggagcaccccattcatcgcgaaccctaaatgatcagacaacaatggaaaaagaacgtccccagggacgttccaatctgacgcatcaattcgattcatacacaattcacacatatagctcgtcaccagcagacagtgaatgtatcactgttcccggtgacgggctatttctgagcaatccttcttttaatcggtccgtctctgcccggtcagcatgcacaaggaccgtatgccttgctggaacctgatgcagcatccgttcaacatccttccagccctgatgtactttataacgtattttccgcacatcacacactccatacttgtcaggaacccgtagcaacttatcagcaaatgtaccatgagcaacatgcccagtgagcaggatcagattctcctccctgtccgataattgactatagtaccaacgggcaagcgaggactgcatcatgccgtccggaatgaaccatagcgaagcagcatgatgttccaacagttgttcccgctcttgggtagtagtaggcagatcccatccccgtccagtcagaaagccatcaatttcgtctttcaacgaacttccgatgacacgctctcccttctccctcaaccaatacggaacatgcataagctgcttcatcccttccaccagcccttgttccactacgattggaatagccgggaattgttgttgtgcccacagtatgatctcctgtccacgccctacgacaggcataggtaagagcacctttccaccttgagcaatcgtctggcgaatggctcgttcaagctgttccagtttgtcggcctgtgtatcctggtccgtaccgtaggccgcatcaatgatcgccagatccaccagcccgacggaagatattggcgcagcgtctgctacgtttgctctgcctgctctgaatgctccatctgctccattggatgagaaattcctctgcttcatgggtatctccgtggatacgagtgttcttgacgacgcttctgatgcaacagatgtctgatctggtgacgttatgagttctccagccttttgcccactgtttatagcaattagttcctccgcgccccactgttcactgctcggagtatcgaacaacgtatcttcacgaatcatgttttcccgtaagaacgcctccgctggataatcctcctgtaaaagcatcgattcggacgtgtagtccccggaataaaaaatccgcttaccttccatttcaaccccaaaccataccgatccagccagatgtccactccggccccacatcacttttactccaggaatgggttcgaaccaggtttgggatacaacctcatcctccagataccgataacgaatagcctgctcatctgcttcatcgtaagggagcttctctccgacacgttctgcaaaccttcgccagttggcaaaatacgtacgtagttgcgccctcgtctctctcgtcgtccacacttcaccctggtagcccatcttgtacagcaaagggatggcgaccgaatgatcctcatgggcgtgggacaacaggaccgcatccagttgcgggacaatctccgggtcaatcatcggatactcgcccgtgccttcttttttcacaccacaatccagcaaaaggtggaactggctcccgctcaggagataggcggaacgtccgtgttcccctgcaccgccccatacgttcagtttgatcatgatgcattccactttctctttgaattcagcagttcgattcccagcagcatcagcaccgtcatgcctacagtcacaacagccattgccattcccaacgacacctgaccttgttcaaactgggcaaaaatatacgtagccgacgtctgcatcgacggcggaagaatcaataacgaacctaccagctcccgggtagcaatcgtaaaggtcatcatccagccggccagcatgccgggcaggatcagcgggatcaggattcgccgcagaatatacagcggcttcccgccaaacacttgcccagcttggaacaacgttccgtcaatctgggtaaagctcgattttacatactgcacggtgtaaggcaagaagagcacaacgtacgtgagcacaaccatgccataggtgttatacaacgtgactggcatccagggtgagttccagaacagaatcaaacccaccaccatcacgatacccggcaccgtattaggcaacagactgaacaagtcaatcacacgctgcatgaatgaagatgatctgccgatcgccagcgcaaatccagttccgataataacagcgaccgttgaagccgcaagggatagaccgagactgttcccgatggccttcatgctcaccgatccccaagataacagctccttgtaatgatccaaggtgagattatcaaaagcaattcctgatccccgtaacttcatggtcgaagcggcgatgatggagaaatatgggatacctatcgacaggatcaacagaatcgcaagatacaccccgcataaccatcctgctccgccacgaagagaatatcgcttcgaacgttgccctttgccaccaaccagacgatacgtgaactttcgactcatggcagactgcatataccacatcaccagacagacggacagcagcaccgatgccagcgaagtcgccttgccgaagtcaatcggccaactggagatgtacttatggatctcggaggtcatgacataatagccaatcttgcgcccgaaggttgccggagttccgaattccgcaatcgttttgacaaagaccagcatgatccccatgccgtaagatgacaacaataagggcaaaataatacgtctgaaacggtaccctgcacgtgcaccgtgcacagctcccgcttcttcgagattgccaccgatgcggatcaatgcatctcgaagcagcagatacaggaatgggaacaagtgcaagctcatgatgagcaccatgccccagaagctgaagaacagctcactccagcccgcagatgagggcacccattgttgcagatatccccctttttgcataaacagaatccagcccatcgaaccgatatacggcggggtcatgaacggaatcatcaggattacatcgacccagcgatgctcgcccattcgggtcttcgccatcatccaagccagcggtagcgccagcagcgtggttaccgctacaacgcagatgccaagccagacggagttcagcaacacacctgatagatgatgacctgtaatcgtgcgaatcggagccatccagtcccattgtccatccggatacacactttgccagaagatcagcaagagcggcacgccaatacttatggtcagcagaaagagggccagaatcacgcccactctccgaaaaattcggttgttgtccattccaacaggtttcactacgttcacctcacatgactttccacagacagcaggtattccttttgcctaattgtctctatccttgttcttcttacttaaaagtctcggaaaaacgtgccgctgtctcttcgccatgttcgctcatccagttccaatccactttaagttgtggaatatccttcacattggcacggttagtcgcttcaatgtcttcgcggcccggaatcagataagcatcagcaacgagcttctgtgcttcatcggacaacaggtagtcaatgaatgctttggcattctctacatttgggctggatttcagaatcgctgccggtcttgggctgattaccgtgccttcctcaggatatacgatatccagtggttcgccttttgccttggaggaatacgccatgtagtccacacctgctgctacgatgcttttggcacccgtaataaccggatcaagtgcttcctgattggcgcctgccatcgctacaccattggctttataggcactcagcagatcccatccttcttcaccattcgcactcaggtagcctgtgatgaagtcgagtgctgaaccggataatgtagggtcgggaatgttcactgcatctttccacgcaggcgtagccagctctgcccaacttgttggtggtgtagataccagtttggtgttatacacaatgcccagtgcggaagcactgctgctaaaatagttgccctctgcatccgaccagtccttgttcaacttgtctgcattggctgcttcagggtatggcatagtcagtccatcggctttcagagcctgtgctgaaggtaaagaggccaggattacaacgtctgcaaccggattggatttctcagcttccatacgagccaaaattttgcctgtcgttccctggaacatctcaacttcgatccctgttttgtctgtaaatccgctcacgatgttatccgccagcttctgtgggccagcactgtacaagaccaacttgccgccagccggtttcgttgtttccgccgctgctgctgtgtttccttcacccgcgggttgtgccgcgttgcctgtggttgtgttccctgtactacatccgaacaaactgatactcattaccgctgttaataacagcattgcgctctttttccgtgttttcacacccaacatattcgtccatctcccctggtttcttataaaatgtgtacttctgcttccaactgcgtgctcgttcaacaatttaatatgccactgcgatcgcttcgttctgcttcacactcgggtggtcataaccgtccattcggcatatccgctcaggggttacatagagctgcacccgctcccctacgcgcaccctttggttcatataggctgtccatacacccagcccttccatctgcactcgcacttcgtaacgctcacctacatagctgacgctgagtaccgtccccggataacacagatcgtcatggcctgttttgttccaggtgacatgctctggtcgcaccatcgattgattaggcgtgagccagttggactttccgataaacgaagcgacatacggatcacttggcgccgagtaaatcgtttccgggcttcccttttgcaatatccgccccttctgcatcaccacaatctcatctgacatcgacatcgcttcaatctgatcatgtgttacgtacaacgcagtcaatcccatgtcccgaaccagcgacatcatctcaatccgcatctcttcccggagtacagcatccagtgcactcagtggctcatcgaacaggatcacaccaggtctgaccgctacggctctggcaaaagcaacccgttgctgctgtccaccagacagctgatgaggatatcggtcttccatgccttgcaggcgaaccatgccaagcgcttcgttcaccttttgccgcagatcagatttctgttttccggccttcaggccaaacgctacattttcgtatacggtcatatgcggccataatgcaaaatcctgaaacaccatgcccagattacgcttgtgtgttggtatgtcaatccgcttcgccgcagagtagatacactgaccatctgcccgaatctcccccgcgtcaggctgttccagcccagccaacatgcgcagcagtgttgttttgccacagccggatgggccgagcagggtcgtgaactttccatgttcaagcgttagatctgttggcagcagtgcgggtgtttgattaaatgatttttgaattcctgtcatctctaatttcataagcatccctgcctgtcttctgttacttgatctcttgcactgttctcagtctaacgtccgctttcgcgagttgtatgtcttgtatgtaaaattggaattaactttttagatgaattctgttgatgttcatagattaaatctatagtaggtgaactaaattaattttcatgttgtcgcttcgattacagcaccatcttccgatcgctgttatccccagatttcttatattccctttatgaagggagaaatccggggataaaggcgaacgcttcgcttcttcagattggttctgtactctccgtctttatgaaaaacattagatcatcttatatattggggctagtagaagtgagaggagtgtcgggacattgaatctgatcaaattgcaaattattgaactgatcgacaaacatcatcacatgacaagcgtggcggagttactggggatcaagcaacccaccgttacatttcatatgaagtcattggaggaagagatgggcgtgcgattattcgaatcgcgcagtggaaagacctttttaaccgaagccggacaggctttgctccactattctgtaaaaatcaatgctctgacccaagaggcaaggcgggtagtgaaggaatatgacagtctctatcgcggcaccctgcacattggagcaagctatgtaccggctacatatttgctgcccaccatactcaacaccttttctcaggaattcccgggcattcgtattgtcttatccgtcaaaccatcacctgttattcgcgagatgctgattcggcatcagattgatctgggggtgatctcttccgagccatttgttggacccgccctgcaagctgagacgctgtgtgaagatgacttagtattgatctgttccccacaacatgggttggcccagaaggatgctttaacaccagatcatatcgcgcagattccttttgccttacatggcaatgaatccagtacacggcggctaaccaatcaatggcttgcgcaacatgatattcgtttgcggagtaccgtggagatggattccctggaagcgatcaaacagctcgtattaatcggggggcatgtctcattcatgtctcggatggcggtacagtgggaggaacagcacgggctcattcaagttcttccaattccgggagagcaggcaccgcgccatatctatactgtacataacaaggatcgccacccttccgttcaggtaaaccgcttcaaagaagtgctgcgagaggtgagtcacggcttccccattttccatggctgattgccctgaatccgctataaactatcgtttgccattcatcaaatctatacagggttaacgcaatgtgcgcttccctttaatcgctttcatatattcaggcgataaagtgggatttgtacgttaatccagattaggagagtgattggttttgaaaaagtggaaaaaggtaaccgcctcattgatgctgagcatcgtaacattgggaagtggaatgacatttctgggagcaccccaggcttcagctgctgccaatgccgttcctgcttatgaagtaaagtttctggccaagccggaacttgtattgaatacagatgggacaccacgcagtgaagtgatccagacactcggcctaaattccacgccaagaaatattaacgtagagtacttcgacaccaatgctctcggattggatcaacaaggatggaacgttcgttttcgcaaaaaggatgacaagaataactacgaattgacttataaaaaacgctaccctgtaatcaatggcgacatcaacgcagcgctgactctggctaaccaagagggatttgataaatcggatgataactacgaggctgagattgattggggatacggcaaacagacgctgagcttctccaacaccaaaaaagtcgataccaaagcgacaggagtccaacttccttcgcagcaagaagccttgaacatgttactggacaagcttccgggcaaattgaaaaactggtctgcctccaactggggcaagcagcaattgactcaatcccgtgcatatggtccaatcacattccaacgatatgaaggtacatggagtggtcaagagcttacactcgaagtatggccgatccgtgacgcagcaggtacaggtattgagaatatcgtagaggtttctttcaaaaccgatgatgctgtagccgtatccggactccgtacccaactgctgcaattactggagaacaacaactggctgattcctgcagatggcttgaaaacacagacgattctggaaagatactaatcgcaagctctaattaaaaagacaagttcctcttcctgcggacatcgtaggagaggggcttgtctttttttgcgtagtgaattaatgaatgccatggattatatatatcgtgtaattccatgctttaacaaaacatctatctgcctaccctctgtaacaaactagaagccctgaaacctccttcgtattctctccactaccactcagatgatcgaacaaccttccgatcgctgttatcccaagtttttttaattagtctttaaaaggtggaaatccaggaataacctatgcttccgatgcagctttctttcagaaagcttttagacgcacgcttcgcttcctcatattatttctgtcctctacgttctcgtttaaatgatagttcgacttatacataatggacttcttatttgaatgacaatatgcgataattgataattattctcaaatacatcatatgtaatgttactatcgtaagttaaggagggattctggtgactttgcaagtctttccactgatatctaacggtgaccatacccgtgacctatatgcaagattcaagacatccgaagttctcgatcaagcgtcttttcttgccccattcgtattagcggactcacatcttctgctcatctgtactggtggtgaagccgatattcgtattggccacagactgaatcatgccacactcggcaagatgtatctgatcctgccaggaacagcgatagaatatacaacggatgaggttcatcctttacagggcatcgcgatatattttgatatgttgaagcctctctccgatatcaataaagctacttccggctctactgtaagggagatttaccaaaaagggttacttcgttcatcttacgctgatgaattaccgcatgaactttttcaggaatgtaccagaattgcctcccagctctatgaatgcatctctgtacctcaagaaaatcgtccatttcgtattcagactttgatgcatgaattgttgacccatgtgtatgctcctcccaaagaaagtgcaataggagattccgaacacacctctgctttggatcaaacgcttgaacttattgagcttggatatgctgagcatctttctcgggaagttcttgccggagtggcaggcatgagtgtatggcactattcgcgggtattcaaaaacagcactggcatcagtcccatggaatacgtgaataacatccgcatggaccgggccaaagagatgctgctcgtccccggccaaaccatcaaacatatcgcctcacaggttggttttcaggacgagttttactttagtcgcaaattcaaaaaatatgttggcgtgtctccctctacctatcaacggcagaaacgcagtaaaattgctactctctccttcggaaccactggccatctgctggcattgcagatcatcccccatgcggcattgatcgataaccgacgggatcaacacaggaatctttttttctccaatatcccttatcatctggggcgtagcaaacgaatgaatcctcatatctggcaaaccaacgttgagttgttgatgcaagcgagcccggacctcatactctgtaatgagtacgaagcccatacgttaaaaagaacactgcagcgaattgcgcctaccatcgttattccatggaaaggattgagctggcgggaacacttcgtacaagttgcctccattgtgggacagcaacaagatgctcagcaatggttggagcagtacgatgacaaggtaatccaagccaaagagcagcttactcatttaatcggtaaggatacggtctccattattcatatcatgatgggtcatctgttaatctacgggcgacgcaatgggggcgctgttctatataacgacctgggcgtgtccccttcacacgatctgcttccggggcaagtctatcgtgcattggatgaacaggagttgcctcaaatggttggagatcgcatgttactgattgtggaccaggactcagaatcccagcaacgttggcataaactacaacatactcagctatggcaagatttgatgcctgtgcagaaccaacatgtatatctgcttgatgaaatgccttggttggattattcaccatatgcccatgatcagatcatcgatgaaaccctgaaactttttggtgggactcagcacattaatccatgaccggatagcacagaaggctatgtctccctcaacatgagaccgctacaatataaagtatactgagaatcaatatcattagaaacacagggggattatgatgtacaaacagcattatgtcaaaataacggggatcatgttcatactcgccatgttacttgttgcgtgtgggcagacacctgcaagcacttcgcaaccatctgcagatggcgtaaaatcagctgcggggacagatggggactcatccactgaatcagctactaagaccgtggagagcgccagtggcagcaaagaaatcccggcacatcccgaacggattgtgtccattaatatggaggacattctcctctccttggaggtaccactggtacttgctacacctattggtcggcaagattacctgaatgagcaacttgaagctcaaggcgtggatgtcgaacccatcaatgaaagtgtcaattttgaagctgtagtcagcgccaatccggacctcattattgccaatgccagtttggatgccaaaattctcgaacaactcgagaagatcgcgcctacgatcacttatgatcgccgtaattggcaggaatctatcgtgcaggtagctactgcgctggatattgaagagcgggctgaacagcttttacaaaaaaataaagaccaagtaactgaagctcagaagcttgcagccgatatcaccaagaccaaacctacagctgcattcctgcgcctggaagagaaggatatgcgtttgttcttctcttccattccatccacgccattcccagcttccagttatgtaggagcgggttatgaggttggattcactcccgatgctctcgttaccaaactcgaggcagagaacccggatcggatgaatgccagtatctcggtagaacttttgcctgaaatcaaagcagactatctgtttatcgtgtccattagctcagatgggtcagctgaagcgttgcaaaaaacaaaagatgaactcaatgaaatccagcaactccaagtatggaaaagcctacctgctgttcaaaatggccatgtctatgtcctcaatgctaagaaatggctcattgacggccccattgccgaatcgctcaaacgtaatgaaatgctcgaagttcttggactacctgctccatgatagtcaatatacctctgtttcatccacaacaaacaaaaggagattcaccggattttcggtggatctcctttttatttaatatttcaaatggcctcattcagttctgtttcatgaaaaatcattctacatgcttaacaactaaatgtatttcatgtacacctttctcatcctgcaattaattagggataggtaatcatcaaaatcatatataactttccggcttttaatatattttgaaattttgggctgtttcaatcccaagtgcactctggataaacgtattagccactttctctacaggtacaggattaaatccaataaagaaatccatatatttctccgcagactctacaaacagattaggactaaccgaattcaaacgaatgcctcttggcaactcaaacgctgccgctttggcaaacgaatcaatagccccattgaccatagcacttgatgcgcctttctcaatagggtggtcttgtataatgccactgaccagcgtgaaactccccttgtcgttaatatagtgctgtccaatcaatacgatattgacttgtccaagcagtttaccctgcacactaatcatattgttctcaggtgtcagttcttcgagtttagcataatgggtctggcccgccgccacaatgacgtaatcaatatttctcaccgtttcgaagagggtagtaatactctctgtcgacgtcatatccacctgaacatccccggaatttctacctgctgtaataaccttaacggaataatctctcagtttcgcaacaacggctttacctaatgttccgtttccaccaatgaccagagctcttttcattactgtttgtcctcctttataaataaatacggttaatcatatacgaattgttctatttatttaaacaaagattccatccttaatcaaatgacaattaaccctattttaaataaattacacttattctttttaacacaaaaaaaagcctttgctataagcaaaggctcttctatatgttactaggaagcgggtgatgggaatcgaacccacgctattagcttggaaggctaaagttctaccattgaactacacccgcaaataaaaaaaatcgggatgacacgatttgaacatgcgaccccctggtcccaaaccaggtgctctaccaagctgagctacatcccgatacttatgaga

SEQ ID NO: 8 - DNA, 311925 bp, Paenibacillus xylanexedens
  source 1..311925: mol_type = genomic DNA
gacttcatttaaacttcctctaactcaaattgtacattttgaaggtgttacttcctgcaaccgatatttttagtgaattttcattcataaaggtcctaaaccgggtgctttttgcacattttcaagcgaaataggaatgtgtgtttgtagatgggtgaattggaagcataattttgccaaatggcaaaattatgggttaagtctcacatacacatgttgaaaaagaatgatgagggacatggagaaagtagtacttggttaacccataacagaaaaaagtcgttccgctgcgaacgacttctttttgaatttcatgataataacacattttaatcgttatgcgttatgaggatagtttggctgtctcttagggaagttgactaggaaggaattactctcttgcttttgagatactaatcggcaagctaattatagttgcactgaataagttgagtatgtgatcaatttgatcccaacttttatgccaaattatcatattaaatgcaatgaataacacactactgagtagaaagaatcccaggaagtatttgaaaaatatttttagattcatttagtctcccgcttatccatttagaagtttgttacggttgcatgccctatttcgtttgtaatatgttttctattttagattattaaatgcaatcatttgtttttggtttgttgtatatatgtaaaaatatgtttttagttacggatttgattaatgttatgtgatttttgttgtaggattatggttatttttaccgaataatagttaggccgaccttagaggagggatagagatacttagggatcgtagcactatacataataatgagggaatcaagaaaatggaacttgtagaaatgacacaaagtaccaccaatgcaactaagaagtctaaagtgaaaagggtcgggaagacaatatcgttgtagattggagttttggttatcagcttcattgcaggacagtcctccgcttttgcatcatccggatcgggtaactccatcacttcagttcttgaccggaatgactatttgctggacgatggtacactttggtctaaagggatcacaagtggagtatggacacaaaatcgaaaactgattggtatttcaaaatcagaagaccattccatctttgggtggaccgccgatggccaagtgattcggtgggataaggacaatgcgcatataccagtaacgaaacaattcaatagcgttgtgaaagtttatggccatggatgggttcagcttcaggatggaaacctttatgattttgatgatcaggctaaggttttggaatcgattatcgatgcggattcttattggagtagtactggaagcgattcttcttatagcgcattatcttcatcaggagatatatattatgacaaatacaacaaaatacgtaaagctggaaatgtacctgatggtaaagcaattgcaacgaatggtgtttacgcagctgtgctgaaaaatgatggctcggtagtgatcgtaagtatgctgtatgaggatgactacatcacggttgcaaataatgtgcaatcttcgatttggtgggggagtacgcataagctgctcacagtgaaacaggatggaaccgtctggagctacgatcgaactgccaaatataagggcgagcaactgccgggtttaagtaacgtatcgcggatggtgtatgcgcctaatctggatgaactatatgcacagttacaggatggatcgtgggttacatatgataatggaaagttaacttctctatcagctcccgcgttaaatcaagtgacacttacggcatcttccaaggaagctaatattggggatacgatcacgcttgctgttcaggagaattatagtaatggtttcaaaaacaagcgtgcgccattgcctgaagaaattatagtggagcagccccaagttgcacagattcaggcaggaggcaaactgaaggttacgggcatgggaacaaccaaagtgactttgaagataggtgatttggcctcaagtcttcaactgaacgttgattcacagcaaaagttaacaggcgccacattgttggatggaaatgtatacttgccagtacagtcggtgttcaaaacattgggagccaaaattgatgtgaaaggctcatcttttgaaattcaatttggagttgacagtattactttgcaaaaaggaagtgctgttgcgcgattaaacaacaaagagctgaagttgaaagggaaagtacaaaccattggagggcaaactgtatttcctgcggacttgttaagacaggctgcgggtattcaggttcgatgggatgctgagctaaagcaggccaaggtgctggttggaaattcttctattctggtggaatcgaaggatacacttgcactgatcaagaaaaaagagttgggaaatcttgctcgcttcattggcaagtcctactggatcaacagtgatacgagtttagggcaacgtttcagtaaagtgaccatatcagatatcaaaattgaaaagattaaatacggtgatcgaagttactctattatcttccgtaatgcaaaaggaaaaaccgtttctgcctacgcaggaggtgcaccttccagtgtgacggagatgcttgcggattccaaccaattcttctcttctgatccgtataagaaatacaattggtccaagtccacttggaataaaatcattgctggagaagtagctttaggaatgaacataactcaggtgcgccttgcttggggagatccatcgagcattacgtatgaaacgagttcaaaaggcaaaatcgaggtttgggtgtatgccagctccgcaggcataagagctttagggtttctcaatggcaaactgatggcgatttactgataaatataccaattaatcacttcatttgattgcaggttacagcacagcacgaaaaaaagcccgctttccgttacactccacgagggagaatatcggaaaacgggccattttttcaaaatgtagaagaatataagaactactctatgccatccttaaagtgtttgttccagtgtttatcgcccttgtgcaacagatcttctaccgttttctcaagagtcatcaacaactgcgctctgacatcaagcacggtttctctgtacaagcgttcttccgatccaacgattttatcgccgtataatgcctgtgcagctacgtacttccgatgttcctcgaccagagtatcaatggactccaatgcatgttccacaaagtgggaaatactttggtattctttgggcatttgttcttttaaagcttgaattttcgcaagagctggcatgctcatcacctcgtgtttatgaatgtaaatttacaatacactattttcatgaaaattgcattaaaatcagcttaaatttggacaaatttcgactttttttattttaggaaccaaaaaagtgcttatctataatgtatgccattgcatttgaattgagtcgtgtaagtaatggaatcgcttttggatacgtttggtgactcgttatgcaatttctgttattctaagagaagatttcagcggccctaatacatacgccgttattttgttatggcaaattaaaaaaatacttaactttgcaacaattttattgatgatcacgtctgtaaggttgcagggagagggggatcctttgtggtagagccggaactcatcagagccgctcaatcgggcgatcgcgacgctctaattaccctattgcgggagattgaacaacatgtctatcggaccgcatattacattctaaataatgaacaggacgctttagatgctgcgcaggaagcgttgatccgaatttacaccaaaatcaactcatacgaagaaaaggcccaattcaaaacatgggtacaacgcatcgtcacaaacatctgtattgataaattcagaagaaccaaaccgtccgtctccattgacgaacatgacatggtttttcaggataatcaggatgtggagtacgaggtcatgtctacatatgtggcccaggacattcaggatgcgatcaacaagcttcccgagcatcatcgtaccgttattgttctaagatatttgcaggacttatcctacaatgaaattgcggattgtctcgatcttccgttgaatacggtgaaatcttatttatttagagccaggcagcaattacagaatctactacaggaatatcagaaaggtggtgtgacaggatgaaatgcgaagaggtggtggaatggatgcaccgctatctggatcatgatctgggcgaggcggaaaccgcgcagatgctacagcatgtggcaaagtgtccggagtgcgccgagaattttagtttactcagagctctttccagagaactggaagaattaccgcaagtaagcccgaaatttagtctggttgatgcgattatgccacagcttgatgccattgacgaagcgcggaaggaacaaagtagcaccatacaggaaatgaatcctgtccccgctacatttgagaatttacaacgttcaagtgagcggaaaacgaagcaaaaatggcttaactcgatggcaggacgtatgtccatgggtgcagcggctgcggcagttatattgggattcgccatctggggaaatccgcctgaacagattgagaatgccgattccatgctgatgagctctggagcttctcaagagagcggcaatgtggacgagaatccattaagcaagaatattgaaaattatgatcctgccacttcgtcccaaccaagcagcaacgatgtgtttgtgggtcaatcgaatgattcaccaactaaaccagataaccaagacgtagaaacaatgcctgaagagaacggtggagatgaggtacaggagcctgaagttcagtcagatccgacacctaaacaaccggctactgaatcaacgcctgctccaattaaagggccgcaggataattcgtccagaactccttcgaccgataatcagaagaatccggctcagaaccaagattctgagcagagaattcagggatcaggagattctcctaaatcttctgcagatggggaagagaatggagtaacagaaacagaaaatggagatgcccaatccttcacttctcaggatacaacacctaatatgactgaagatgttccggttgaaggtaacactgtacctgattccagtgcaggtgcagacgcttctggagggaacaaaggattcgcagcaggaccggatcagggaatgactacaacagcagcaccaaaagaatggaagtcacctgacggttcctatgtagttatgcttattggtgatcaaatcagcatatactccaaacctgtgagcgaaccggatgttctaaatttggttgaacaacgtagcatagaggggacactgaagtcagcgagttggtcaaaggatggtaccctttttaattacgaaacggacaaggacggaacaacggcgaagaactcgtttaatgtacctgctgtttcaggtggagctcctgcgaaataattaaaaatggggagtgcgctcctctaaacgaaagaacattttcagtatgacaagcatatattggaagtaacaaaacgtcctatctcagttcaaacaactgacgtcgtatgaccgcgcaccggctttttctagaactgctggtgtcagcgtttatatagatgtaggacaggggaccttcatccataactggatgtaaggtccctttgttgtcttgcgctttttctggtaggataagagggataaggaggcgccgtgaatggatgtaaaaagtgcaacaaaggcaatacgtaatggagaaacggcaccgatctatgtgctgtacggaacggagaagtaccagatacagcaatttacggatatgttaaaagaacaggttattgaagaagaacatcgtgattttgcgattattccatatgatttgtctgaaacggctgtggaggtcgttattgaagaagcagagaccgtaccttttctggttccacgcaaattgattattgtaagggatgcgagcctgtttaccgcaggtaaagaatccaagattgaacatcaggttgatcgtctgcttacatatatggaaaatccggcagattacagtaccattgttttcctggcccaaggggataagctggatgagcgtaagaaactggtgaaagctgtcaagaaacaggcagtagttcttgcttttgctccactcagtggagaagagttattgaattggatagtgaaacttgcgaagcagcgggatgtttccttggagacgggagcggcggaaacgttgatcagctatgccggaacaggtcttcagaccctgtctgctgaagtagataagttatgtttgtttgcgggtaatggggggacaatcaaacgtgctgatattgagtcactggttgcccgtagtacagagcagaatgtattctcactagtggaggaactcgctaatttgcgactggagaaagcgttggctcttttctatgagttgctgaagcagcgggaagaaccgattaaaattgcggctctaatcgcacgccagtttcggatcatgatccaggtgaaagagttgggccaacaaagttactcccagcagcagattgccagtcagctaggtctgcatccgtatgctgttaagattgcaggtgagcaagcccgtaaatttcagccggaacgtctgagaatgattttgagtcacctcagcgaactggattaccagatgaaaacaggagcggtggataaagtgcttggtctggagctgttcttattgagacttggtgcatgaatggataagaaacgtaatagattactagtgtgaataacaaacaaagcgacctttgctccatgatagttaaatcatcggaataaaggtcgctttatctttgtcttatacttatcgaatcagatactaaaaaatcctgaaagcctatgctgttcaggatttttccattggatcgtataagtaacgcttcttacgcttgtgcggaaagagcgttcagttttttcgccaagcgagactttttgcgtgctgcagcatttttatgaaccagacctttagttacagccttgtccagctttttggaagcagcttgaatcgcagcttttgcagtatcaacttcgttacttaccagagcagcatcagcagctttaacagctgtacggagtgcagacttctgggaagcgttgagtgcgcggcgcttgtcgctcgtttttacgcgtttaacagcggatttgatgtttggcattacattcacctcctgtaaggcatttgcatgaatacaaacgtttcacaacttaaaatattctatcacgctagcatgtaaaatgcaacagatattcctacgatgttcgacatgctgtataaagaaaccctttttcccacacaatatgctcaaatgcggtaagggaggcagggacagaatgacactggatttgcaaaactatacagttcgtaccgatttggcgatcgactccaaggaaatggcgcaaggtggacagaaacagacgattcccggactacaggaagatgtagagaaaaaagagggaattacgattacacgtattgatgtcctgactgaagaagcagccacggctattggtcgggtgaaaggtcactatgtcaccttggaagtaccttcactacggaatggtgataccgagttacaggagcgagttgcagccgagttcacacgtgaaatggaagattttatggttaaggccggaattaacaaaacatccaaggtcttgattgttggcttgggcaacttaaatgtcaccccggattcacttggtccacttgttgtggaaaatctgatggtgacgcgtcagtatttcgaattggtgcctgatcaggttgcgccagggtatcgggaagtcagcgcgattgctcccggcgtgttaggtacaacgggcattgaatccagtgacatcgtacaggggattgtagaccggaccaagccggatgccattattgcgattgatgccctggcctcccgttccttggaacgtgtaaatacaacgattcaggtagcggacattggtattcatccggggtccggtattgggaacaaacggcgtggcctgacccgtgaaatattaggtgtgccttgcatcgccatcggagtaccaaccgtatgttatgcgtccaccattgtgaacaatgtgattgagatgatgcgctcacacttccgccaggaaacggatcagaccaaacagatcatggggatgctggacgacattggtgagcaagatcgcttgagtctggtgaaagaggtactggagccactaggtcatgacctcattgttaccccaaaggaaatcgatgagtttattgagggaattgccaatgttattgctacaggacttaacgcggcactccatgatgctgtgaatccagataacgtagcggcctatacacattaaaacttaaaactgctgagaagaaggtccgaatctatcggactttctttttttttgtttttggaatctttcattttcctgttctatcaaattgggcgggctcatagagttgaagtataagagttgtccagcagggaaggagacagcagaatgaacaagatattggcctggaatattgggaagtggaaaaaaagatgtctgcacgtgctggccatgggccgtacgttgttgttgcttatgatcatatctgccttgttttttgtcgtactgggtctgggggggatggcagagaaacgcttgaataattcacccgtttcttccatgaaaggatttgcgagtgccgtatcaagccgctttttcgtcgatatgctcggtatggagatgccccatctcacccagaaggaacagacttctgctatatccggtgaaaatctcacctcatttgttttccaattactaacgaatgtaaatcctcaagatccaaagagcctgattgcgagagaaatgccgggcatgggttccaaccaacctgttctgctccgtcctggatctggtaacgaaaaagccgaggctcccgaagattatcagcccggtcccggtcttacggatacggcttccgcaggtggagggaaacccggtagtgagctgcatgttccaccaggtcaggacaatacggatccacctgagtcgagtgagcctggagatggagaaggtaaagaggatcccccagcgaagaatggtgagaaagacaattcaggctcaccgacaacaggcaaaaagtcaattcttatctatcattcccatccacgggaaggctacaacccactgctaggtacgaaaagtgataatccatcatcaggcaaatcaacaggcaatgtatttcaagtgggaacctacctctcagacagtctggagaagctgggaatcggcgtagaacacgccaaggatgattaccccactaaagttaaggactacaactggaactattcttataaatactcccgtcaaacggtaaaagcggcactctcccaaaatgatgatctgacgtatctcatagacattcatcgcgattcacagcgtcatggcaaaacaacaaccactattaatgacttgggctacgccaaagtgtatttcattattggacatgaaaatccgaattggcggcaaaatgaagcctttgcagcgaaaattcataagaaactggaagccaagtatcctggggtatcccgtggtgtgtggggcaaagatgggggaggagccaacaatggagagtataaccaaaccctttcacccaacagcattttgatcgagattggcggcatcgacaacacaggagctgagctccaacggacatcgaagattctagcagacatgattgcccaagtgtattgggaagatcagaaggtggacaaagccagtgcagaaacgtcatcacagggtggatagggactatatatggtatgaagcacaaaatagtagagagtgacaggaggcaaagcatatgtccagattcggtaaaagactgttatccatcgctgtattaatgttgctgggtgtgctgtttggaatgcagttggctggcagcaactttcatatgggtaattcatcagacggcacgtcaaccgctgtgacaacagagccaacttcatcggtgaccgaatctgttccgactgcacctgtccaaaaggaaattaaagaaccaccatttgtacctgttcagtcaccaagccaagtgcttggggcagatcaaaataaggctccggttgatgtgttggcagacaaaacggctggactactgcaaaatctctcacacagtggaatcaaatgggtggtctctctttttagcggcgttgctgaataaaatactataattttaaggtacaatataacctctgggagtgcatgatgacactttattataaagttgagacatcacgggattgatgcactgtgcttcaactgttataatgaagtgattgacactaggctgtttctgggggtaaggaatgactgacattcgggcaagacaacgtaaaattcgtaacttttctattattgcacatatagatcacggcaaatcaacacttgcggaccggatcttggagcacacaggtgcgctcacttcacgtgaaatgcaggaacaagttctggataaaatggaccttgaacgtgaacgtggaataacgatcaagctacaagcagtagccttgacttacaaagcggatgatggtgaagagtatttattgaatctgattgacacaccgggacacgtagacttcacgtatgaagtatcacgcagtcttgctgcatgtgaaggtgctctgctggttgtggatgcggctcagggaattgaagcccaaacacttgccaacgtgtatctggcattggataacaatcttgaaattttaccggttatcaacaaaattgaccttccgagcgctgatcctgaacgggtgaagcaggaagtggaagatgttattggtttggacacaagtaatgcggttttggcttcggccaaatcaggaatcggaatcaaagaaattttggaacaagtggtgaaaagtgttccagcaccaactggtgatcctgaccagcctttgaaagcgctgatttttgactcgcactatgacccgtacaaaggtgtaatcgtatatgtgcgtgttgttgacggcaaaatcaaatccggttccaaaatcaaaatgatggcaacaggaaaatcatttgaagtcattgaagttggagcgttcaaacctcggatgaccatcgtggacgagctgaacgtcggggatgttggatttatcgttgcaggtatccggcatgttggcgatacacaagtcggggatacggtaacggatgccaaaaatccaacaccggaacctttgccgggttatcgtaaaattaacccaatggtgtattgtggtctctatccgatcgaaacatcggactatgttgatctgcgtgaagcgttggagaaattgcagttgaacgatgcgtctctgagctttgaaccggaaacatccagtgctctcggttttggattccgttgcggattccttggactgcttcacatggacgttatccaggagcggatcgagcgggagtttaacattccgttgatcacaacggcaccaagtgtaatctatcacgttaccttaacgaatggtgaagtgatgaaaatcgacaacccatccaactatcctgaggtgggacggattgattacgtcgaggaaccatacgtcaaggcagatattatcgtaccgaatgattatgtaggtaccattatggagctgtgtcagactaaacgcggtgaatatgtaaatatggaatatctggacacaacccgggttaccattacctatgagattccgttgtccgagattgtatatgacttcttcgaccagttgaaatccggtaccaaaggatatgcatctctggattatgagctgtccggttaccgtcagtccaatctggcaaaaatggatattgtactcaatggcgaacaggtggatgctctgtccttcatcgttcaccgtgatcgtgcctataatcgcggacgcattgtctgtgagaaactgcgcgagctgattccacggcaaatgttcgaggtgccaattcaggcatctgtaggtaccaaggtcgttgctcgtgagacggtaaaagcaatgcgtaaaaacgtacttgccaagtgttatggtggtgacatctcgcggaaacggaaactgcttgagaagcagaaggaaggtaagaagcggatgaagcaggttggtaacgttgaggtgccacaagaggcattcatggcggtactgaaaattgatgactaggacgtttgcttgcaaacgtcacgtgaatccttttggtacatcaataatttgtgtatgaaaggataaacgatattttgtctcgggtacatcacagagtgtgtgtatcgaaattgaattgtaggacgtttgcttgcaaacatggttacaacacagaatattaaataactaagctgaaagggaagccggatggctttccttttttcaaatagagggggacttgccatgacattggcagcacacagccggaagacaggtgcgccccaagcggtgtatcttcacattcccttttgcacgaataaatgtttttattgcgactttaactcttacgttctgaaagatcagcccgtgatgcaatatctcgaagcgctggaacgggagatggaacatacagttaaggccaatccaccgggtgagatcaagaccatatttgtaggtgggggtacgccaacagctctgaaaccggatgagatggccgtatttcttcgttccgtgaagacgtatttcccaaattgggcggacgatattgaattttcgatggaagccaacccgggaacaacggatgcggagaaactcgctgcgatgaaagaaggcggcgtcaaccgtgtcagctttggcgtgcaggcttttcagaatgatctgctgacaggcattggccgtattcataatacggatgatgtataccgcagtttggagaatgctcgtaaagcgggcttgaataacctgtccattgacctgatgtttggtttgccaaaccagactgttgaaatgttgaatgagagtatcgacaaggcgctggaactggatctgccgcattactccatctacagcctgaaagtggaagagaatacacttttccataccctgtatcagaagaaccagttgccacttcctcatgaagatgatgagctggagatgtaccttctattaatgagacgtatgaaagaagcaggctatggacaatacgagatcagcaactttgccaagccgggctttgagagtcgtcacaatattacctactggcgtaatgaggactactacggtctgggtgcaggtgcacatggatatgtgggccgcgaacggcatatgaatattaaaggtataaatccttatgttgaagcttcacgagcagggctgcctcgtctggatcattttgagattgctcgcccggaggccatggaagattatctgatggttggactgagaatgttggagggagcttcggcctctcggtttagcgaacagttcggagagtctatggaagaagtgtttgcgaagcctttgggcaaaatgttgaatgcaaagttgcttgagcggacggcagacggcttccgactgagcgagcagggtatcctgttcggaaatgacgtttttgcggagtttatcgggtccatatcgctgaattcgtagcttgaaattgtatacgctttgttgtatatttattcatattgattttacagagcgtgttaatttaacaactacgaagtcagctttcctctggaaagcttggtaataggaggagagcaggatgtcggtaatatgcagaaaagccgtgccggaagatgttgaaccactgtatgaaatgattaagggctatgcagagcgtgggatcatgcttccgcgatcacgggaaatactgcaccgacagctggagcactttgttgtagccgaagttgatggtgaagtggtgggttgcggatcgctttgtcgtctggggaatgatttggtggaagtcagatcactcggtatctcggaaggacacaaagggctcggtattggctcccgattgctggaccgactggtagaagaagcggagaaacaacagattcctaaggttatggcgttgacatatgaagtatccttcttcctcaaaaacggctttgccgtagtggaaaaagagattttccctgagaaagtatggaccgactgtgttcattgcagcaagcaggattgttgcgatgagatcgcggtattaaaagagcttaacgtttcagcataacaactgaatggactgcatgaatcgagccgagtcagcctctgccctacatgcagtccttttttacttcaaagtatgttcaataaagttgttaggactcgtcgacattggtctatactataaatagatgagcccactcatcaaactcacttgacaatgttcacgtcagtttggtatttttgtattaccgcttagcactcatctaaccggagtgctaacgacatgggacagtacagtcagaaggagggatactcaccatgttaacagagcgtcaacgaatgattctgaacgctatagtggatgactatatccgttcagctgagcccgtagggtcccggagcatttccaaaaggggagatgttggatacagtccggcgacgatccgtaatgaaatggcggaccttgaagatatgggtttcctggaacagccgcatacatcggcaggacgaattccatcccataaaggctatcgatattatgtcgatcatttggtcccttggaatcaggtggagcctcaggaattggatgatctcaagtcgttcttcgctgaaaaattgaacgtcatggaacaagttattcagcatgcatccaatattttgtcacatatgacgaattatacttcgatcctgcttggaccggaagtattccatacgtccttacgtcacttccaattgcttccgttgaacgagagtgaagctgtggcaattatcgtgaccaatacaggtcaagtggagaacaagacggttcagattccaccagaaatctcggtagctgagatggaaaatgtggttcgcttgttaaataccaaacttgttggcgtaccaatctacaaattgaaatcccgtctttataccgaacttgggcaagagatggaacggcatattacacgttatgaggaagttatgcaggtgctcaacagtgcctttgacaatgaacatgataatcgtctgttcctcagtggtgccaccaatatgttgactcaaccggagtttaaagatatcgaaaaggtaaaagatattcttgacctgctggaagagacaccaacactcatgaaattgatgatgcccgtgccgggtggatctggtattcaagtgcgaatcggcactgagaatgatcatgaagcctttgccaactgcagcctgatcacagcctcctattcattggacggtgaggctttggggtcgatcggtattctaggacccacgcggatggattatgcacgtgtcattcatattttaaatacactatcccgtgacttgacggcgatgctaacacatcgtttcaaataagattcgggaatgaaccatttcattcgtataaggaggtgaacatcttgaaagaggagcaatcatttacagaagaacaagaggtaacagcaactgagcaggagcctattaatgaagctggcgctgcagaagcacaagctgaagagatggctggtcaggagcaggatgagcttgcacgtctgaaggcagaagctgaggagcaacaacagcgttatgtccgtgcacaggctgattttgataacttccgtcgtcgtacgcagaaggaaaaagaagaattggctaaatacgcttcgatgaagctggtcaccgaactggtaccggttattgataacttcgagcgcgccatggctactgtaccggaaggagcagaggtcgaatctttctccaagggtatccaaatgattttccgtcaattggaaaccgtgatgaataatgaaggtctgacggctatggaatcggtaggacaaccgttcaatcctgaattccaccaagcaattatgcaagtggagagcgacgagtacgaagaaggtatcgttgttgaggaagtccaaaaaggctacatgctgaaagataaagtgcttcgtccagctatggttaaagtcagctcataaattccttataggaaggaatgagtcggctccatggttgaacaatgtgggcgaagtttaatataaaggtttgtacacatagagcacgattagcaacatgaacatctaaataagggtcagatcagacccattcattttaaattgttgagggaggaaattttcggatgagcaaagtaattggtattgacttaggaacaacaaactcatgcgtagcagtaatggaaggcggcgaggctgtcgtaattccaaatccggagggcgcacgtacaactccatccgtagttggtttcaaaaaggatggagagcgcgttgttggtgaaacagcaaaacgtcaagccatcaccaatccggatcgtaccatcatgtcgatcaaacgtcacatgggtacttcccacaaggaaacaatcgatagcaaagactactccgcacaagagatctctgcaatcattctgcaaaaattgaaatccgatgctgaagcttatctgggtcaaacggtaactcaagcagttatcactgtaccagcttacttcaatgacagtcagcgccaagcgactaaagatgcgggtaaaattgcaggtttggaagttctgcgtatcgtcaacgagccaacagcagcagctttggcatacggtatggagaaatccgaagaccaaacgatcctcgtatatgacctgggtggcggtacgttcgacgtatccattcttgaactgggtgatggcttcttcgaagttaaagcaactagcggggacaacaaactaggcggggatgactttgaccaagtgatcattgattacctcgtaagtgaattcaaaaaagatcaaggcattgacttgagtaaagataaagcagcggttcaacgtttgaaagatgcagcggaaaaagcgaaaaaagaactttccggcgtattgactacaacgatctccttgccgttcatcacagttgctgatggcgttcctcagcatttggagttgaacctgagccgtgcgaaatttgaagaaatctctgaaggtctggttgagcgtacgcttgaaccaactcgtcgtgcattgagtgatgcgggtatgacgcctaacgatatcgacaagatcgtattggttggtggttcgacacgtattccagcagtacaagaagcaatcaaaaaactgacgggtaaagagccacacaaaggcgttaacccggatgaagttgtagctttgggtgctgctgtacaagcgggcgtactgacaggtgacgtgaaagacgttgtattgctcgacgtaacgccattgtccctgggtatcgaaacagcgggtggcgtattcactaaaatgatcgagcgtaacactacgatccctacaagcaaatctcaagtgttctccacgtatgcagacaatcaaccaagcgttgagattcatgttctgcaaggtgagcgtgagatggcagcgggtaacaaatcgcttggacgtttcatgttgggtgatattccaccagctccacgtggcgttccacagatcgaagtcagcttcgatattgatgccaacggtatcgttaacgtatctgcaacagataaaggtacgaacaaaactcaaaaaatcacaatcacttcttccagcggtttgagcgatgctgaagttgagcaaatgatgaaagatgctgagttgcacgctgaagaagataaaaaacgcagagaactcgttgaagcgaaaaacagtgcagatcaattgatctactctgttgacaaaacgatcaaagatcttggcgaaaaagcagatgctggcgaagttgaaaaagcaaatgctgccaaagaaaaactgcaaggcgttctggcttccgacaacctggaagatatcaaagctgctacagaagaactgacagagatcgttcaacaactgtccgtgaaactgtatgagcaagctcaggcgcaagagcaagaagcacaaggtgctgaagaacaacaaggttctgctaaacgtgacaacgtcgtagacgctgattacgaagttgtggatgaagataaaaaacaaaactaattcgtagttctacgcgaattaaacatcggtgacgttcgaattagagggaaagtcatagccggggctcccgcgctttggctttccttttgtcacgatgtgcgatatggtgaatgatatgggggtggaagagtggctgaaaagcgtgattattatgaggtgcttggcgttagtaaaacggctaacgacgatgagattaaaaaggcttaccgtaagcttgcccgtcagtatcaccctgacgtaaacaaggctgctgatgcggaagctaaatttaaagaagttaaagaagcttacgacgtagtgagtgacggtcagaagcgtgcacaatatgatcaatatggtcatgtcgatccgaatcaaggtggattcggtggtggcggtgattttggcggcggcggatttggcgacatcttcgacatgttctttggcggcggtggcggtggacgacgtgatccaaatgctccgcaacgggggaatgatctgcagtacacgatgacaattgagttcaaggaagctgtattcggtaaagaaaccgatattacgattccgcgtaccgaaggctgtgatacctgtcatggctcaggtgccaaacctggaacgaaaccggaaacctgctcggtctgccaaggtagcggtcagcaggaagtcgtgcaaaatacaccgtttggtcgtatggttaatcgtcgtgcatgttcgaactgtagcggttcgggccaaattatcaaagaaaaatgtacaacgtgcagtggtagcggtaaagttcgcaagcaacgcaaaatccatgtccgcattccagcgggtgtagatgatggcgcgcaactgcgtatgacaggtgaaggcgagggaggcctgcgtggcggaccagcgggagatctgtatattgtcattcgcgtgaaatcacatgatttcttcgagcgtgaaggcgacgatatttattgcgaaatcccacttacctttgctcaggcagctctgggagatgaagttgagatcccaacgttgaccgagaaagtgaagttgaaagtaccagctggtacacaaacgggaacgtatttccgactcaaaggcaaaggtgtaccacgcctgcgcggtatggggcaaggggatcaacatgtgaaagtggttgtggtcacacctagtaagctgaatgacgagcagaaggatctgcttcgccaaattgcttcgctggatggagagcaaacacatgagcatgaacaatctttctttgatagagtgaaacgcgccttccgcggcgactgagaataaaataaagtaagttcaaaaggacaccacaacggtttttaccgcagggtgtcctttttttgtacgcctttttttactgattgagtggttttcgaaaaatccatggatttatgctacgaagcacgacagcaatttgtgggagcatttcggtatattctgagcgaacttgcggaaagatagcatggcgagaatgatatgcatagctgatatgcgagaaattagggaagcaggtgaagcggatgaccgagaaaaatattttggcgtactttcacagcccggagcaggctcaaggggcagccaaaaaactggaggcattgcgagtggaggacctgtcgattaatcgattcagccgatatgcgggtgtaggaccaagcggggcttcctacaagccgggcgtttccggcagtttttcatcatgggtgcccgattcgatgcaaacaaatgccagtgctggaatcatggctgcggcggacccttctgcaagcggcatgagtgatggtggacagggtggacctacaggaagagatgtattactaacggtcatcgtagatgaatcggtacatcaccgcgccatgtccataatcgaacaagccggtggaatgatctagtttcaggaaatgtatataagatggacagataattacactttaacggagagtgtagaaccaatctgaagaagcgaagcgttcgcctaaaagctttcgcaagaaagctacttcggaagcatacgctatccccggatttctccctttaaggagggagttgaaggaatctggggataacagcgatcggaggatggggctacaatcggagtcttacagtgtaacaaatattagttcattttaatttgaaggaggagcattacaatggcagaacatgaacgtccaggcaagatcttaacgaaaacggaaaagatgaaacgtatgcaatccgcaaaaaatgaggacgtggaattcagcgctgaagctgcggatcatgaagatatcgaagcactacgccgcagtgaagcggctgatcgaagacagggacgggagcttcatgactgaagatcgctcggcagtgaccctcgaagctgtttttacaagctggactgaggccgagtctgcacggagagccctggaattgctgcacccgaaccaattaagcatcgagagccttggcaatgaagcatccacattgggctcaaacgatgttacgggctccgataattctcctacggccgtcgtcggaggatttagtggcgaactgaatgtacttgccttgattagtgatgaaacggaaatgttgtccaatggtcaggtgtatgatacacccaaagaggactcggccaacaggctaaaacaagaaattttgctgaccgtgtccgtatccaacgattcgctcccgcaagccgcagagatgatcacgcagaatggtgggcgtttttgctaactgagattcgaattatgcaaaatgctgaagtaaatgaaacagatatgtatgaatagatgacaggatattcgagcagtcaggctgcggatatcctgttttgtttttcttttactggtgcggctttgtgctccggctagcttgtgtagtacaatagttgggatgtttgaataatgaggaggaaaaaccaagtatgttatggcatgaactaacaatacataccacagaagaagctgtggagatgatttctaattttttacatgaagcgggtgctggaggggtttcgattgaagagtccggtactttaaataaaaaacgggacacgacatatggtgagttatacgacgttcctttgaatgatattccggaaggctttgcagtcatcaaagggtacttctccgaaggtacggacatggttgcactacagtctgaagttaatccgagagttgaggaactctccgaattcggaattgatacaggtgaggttcgttatgagacgcgtacagtggatgaagatgactgggcaacagcctggaaacaatatttcaagccggtacgtgtatcggaacgtttgacgatcaagccaacgtgggaagagtatacgcctgaaagtccggatgagaaaattattgagcttgatccaggcatggcttttggtacaggaacccacccaacgacctccctctgcttgcgcacactggaaacggttattcagggcggcgaggaagttattgacgtaggtacaggctctggtattttggctattggagcgataaaacttggggcaaaacatgtactggcgctcgatcttgatccagttgccgtaattagtgccagggagaatgtggaactgaatgggctggagcaacaaattacggttaaagagagtgatctgttgtccgtccttgggagtcaggaccctgcacttggtgtacaactgccggttaaggttgtcgtggcgaacattctggctgagatcattttgttgttcgtagacgatgtctataatgcgcttgagtctggtggcacctatattgtatccggcatttggaagaacaaagagcaggttgtgcatgatgcacttgtagcctcggggtttgaagtgagtgcgatccaccgtgatgaggattggctggcgtttgtagccagaaaggggtaaagtatggacttttggaattcgttctttcgttatccgatcgatcagcttccgtttttcctgctgaccattctgatcgcatttacggtgcatgaattctcgcatgcgtattttgctaacaaatttggtgatccaacagcgaagctgttgggtcgggtcacgctgaatccggttgtacactttgacttgttaggtgtgttgctgctcattattgccggctttggttgggcacgtccagttcccgttaatcgggctaacttcgacaaacctagattgatgggcatcatcgtatctgcagcagggcctctgagcaatcttttgctcgcgatcatcggtacaatcatctatgcttcactggttggttcgggagctctcggcggcattgataatgagcgtctgctcacagcaatcacgacgtttttcgctatctttaacttaaccaactttttcctgttcctgtttaacttgattccgttgccaccactggatggttatcggattctagaggatctactgccaccttcaatcagccgcaagctgcaaggggtggagcaatggtctgtttttatcttcctattgattcttgttatacctccgttgcaaaatgtgacgattcaacctttgtatgagtttgcgcaaacgatgtatgtggatctagcaaaggtgattatcgaattatatcgctaaaagcgcattgtttatggaccggaatactggtcagaaacacgtaaaagttgtatgatcatctgtggcgattggattcacgcctgtcatcaggcggggtgaattccagtcataacaggacagaatgggtggattgactaatgcagcgatattttgtatctgcagaacagtttaatgaacacgctgtgattatcacaggtgatgatgcacgccatattggcaaggtcatgcgtggtaaacctggagataaactgattgtcagtgacggaaactccagagaagcactcgtggaaattgagagcattgaagttggccaagtgacagccaatattgtggaacctctcgagatggaccatgaagcacggattcgtgtaaccgtggcacagagtttgcccaagggtgacaagatggaaacagtcatccagagatgtactgagattggggcggtatcatttgtacccttcctatcagaacgtacgattgtgcaatatgatgccaagaaagaaggcaaacggttggagcggtggcggaaaattgccaaggaagctgccgaacagagtcaccggaatcgcattccatccgttgagcagccgctttcctggaaagggctgttatcttcttttgagggctatagcctggtatgttattgttatgagaaagaaaatggtaaacagctgagagatgcattgaagccgtttatagagcagcttgcacctgatgcaagtgcagaagttttaatcgtggttggaccggaaggtggattttctgagaaggagacggcagaggctgatcaggcaggtgctatatctgttggactgggcaaacgcattttgcgtgctgagacagctggaatggcagcactaacttgcgtgctatatgaatccggagaaatgggaggaatgtaattatgccatccgtggcgttttacaccttaggctgcaaagttaatttctatgatacagaggcgatttggcaattgttcaaaaacgaaggttacgatcaagtggactttgatgaacagacagcggatgtatacttgattaatacttgtacagtaaccaataccggcgacaaaaagagccgtcaaattattcgtcgtgccattcggcgcaacccggaggcgattgtggccgttacaggctgctacgcgcagacttctccggcagagattctggacatcccaggggtggatctggttatcggcacacaggaccgtgacaagattttgccatatgttaatgaaattcaggagtcccgtcagccggttaatgcggtgcgtaatattatgaaaacccgtgtgtttgaagaaatggacgtaccggattttgctgaccgtacccgcgcattcctgaagattcaggatggatgcaataacttttgcacgttctgcattattccgtggtctcgtggtctctcacgcagtcgtgaggcgaacagcattattcaacaggcgcatcaactcgtacacgccggatacaaggagattgttctgactggtattcatacaggtgggtatggcgatgacatggagaactatgatctgaccgatctgctgtgggatttggataaggtagagggtttggagcgtattcgaatcagctcgattgaagccagccagatcgacgaccgtatgctcgacgtgatcaaacgttcggacaaacttgttcgtcacttccatattccgctgcaagcgggtgatgatacggtgttaaaacgcatgcgtcgtaaatatacgacggaagagttttacaacaagatgcttcgcattcgggaagcaatgccggatgtagcgattacaacagacatcattgttggatttccaggtgagacggatgagatgtaccgtaatggctatgagttgatgcggaagatcggtttttccgaaatgcatgtattcccttattccaagcgtacgggtacaccagcagcacgaatggaagatcaggtggacgaagaagtcaaaaatgcacgtgtgcatgaactgattgacttgtctgaacagatgcagctggagtacgctgagcagtttgtcggacaggtactggatgttattcccgaaggtgaagccaaaggccgcgagggaagtggcaagctgcacggttatagcgacaactacattcaactggtctttgacggaacgatggatatggtcggtaaagtgtgccgagtcaaagtggttgaagccggcgtcaacgagagtcaggctacgctggtacgtgtgttggaagagaatcttaagtccgccgcgatgtaatcgaggcgtcagaaacaaggatttcatttccttggggagcttacccggggagatgaggtccttcttttgcaaaaaataagataaagatatcgaagttgatgggggagagcacgatgaacaaaaaagaaatttcagcaggcggagttgtttatagaacaggggaagacggacgtcttcaaattcagcttatcgtagatcgttatggtaaaacaactctcgccaagggcaaaatggaagatggagaaacaattgaacagacggcactgcgcgagattttggaagagacaggtatggtgggccgcattgtagagccggttgatatcattgcttacacgtaccaacatgcagactttggcccggtggacaaggaagttcattattatctcgttgaagccgagagtggtgatctacagcctcagattgaagaaatcaagggtgtggattggtatgctccggaagaagcatggtccttacagcagcagagcggatatgataataacgatgatatcttgcgtgtagccctgaacaagttaggcattaacgtataacgcactattgttcgagtcagttagccgcgagctctgtgggtctggataggcagatcatcaagccacgggtgacttcgccgcgggggcgtggaccggtggttttttgtgccagattggcaagtaacaaaatggcaaagcaagcagtgaactggtgatgttaaaaagggtctgggcatgtgcaatctgtgccccgttgtccgctgacagccaggccgaagctgcatgcagctggccgatcagcggcataaacagcagcgctcccgcaatgtttaatacaacatgggaggctgcgacaaatttgcctgcggatgctccacccgcggcagcaatcacagcggtgatgcaggtccccacattggacccgatcacaatggcgatgccgatctccacaggcaatacccctgtggctgccagcgtaatcgccatgctaatgacagctgcgctgctgtgaatgagcgctgtcagacaggcacctgccaggaagccccaccacaagctatcggccgagcggtcgagaaaccattgaaatacgcccatgctccgcaagggtaaggcaatggattgcatcacctgaatgcctgtcataacaagtgcaaatccggcagctgcgaggaaactgtactggatgttaaacagagtctgacgcgtgcgttcaggagcggccagattgcgttcaccaagaacaacaaacatggcccagcccgttagcgacaggacgagtagtggtagggaagcacgtccgatctgcagtcccaccagctccgtcgtcaggcatgtcccgatgttggtgccgaggatgatgccaagtgttcgtccataggtaattaatctggcattagccagtccaatggtgagtacggtgaccgcagtactgctctgtaacagggccgttgcacctgcactgaaggccatgcctttccatggagcagaggtggcacgattgagccaatctgccaacatgggccctgccatgcgttgcaaggccgtttccatcagcttcatgccaccaaaaaagataataagcccatagagtaagggcaatataacatctctaaacatagaaatatcattccttccgtccggttccttaactcatcctatgagtaagaaaagacaaccatgacaagcctaaaggaattcagagggaagcgacctaaattatcggcctctcaattcgaaagatacggtgattcgtgcaaacgtagtggaggggacgaaatcgaatctgaagaagcgaagcgctcgcctttatccccggattttcccctttaagaaagagaatcaaaaaaaatctggggataacagcgatcagaggaacaattcgtcgccgtagcgccacctaattgcgccaccccaattcgaaagatacggtgattcgtgcaagcgtagtggaggggacgaaatcgaatctgaagaagcgaagcgtgcgcctttgtctccggattttcccttttaaaaaagggaatcaaaaaaattctggggataacagcgatcagaggaacaattcgtcgccgtagcgtctcctttgcatcaaacctatcttttcaactaactatgaaagaagtggatctaccttgccatcagttacactcgaacgcagtcgcaaaaagcggcttgaacatgcacatccatggatatttaacaatgaaattgcctctgttgacggaaacccggaaccgggagatctggtcaatgtattgaatcatcaaggtcgctatctggcgacaggatattacaatcccgcatctcaaatcactgtaagagttgtagcgtatcaacctctggagtccgaacagatggacaccgcgttttttgcatctcgcttccgcgattgtttgcgtcatcgggaacgttttatccaggatggcgaggcatatcgtctcgtttacggcgaagctgattttctgccaggattaatcgttgatcgattcggcagcatcctcgttgtacagttgcttacacttggcatggatcgttgccgtgaagccatcgtacaggcactcattgaagtaatgcagccggaaggcatatatgagcgcagtgatgtctcaattcgtgaactggaaggtttggagcagaccaaaggtccgctgtatggagagtgcccacggcatgtcacagttacagagaatggactactcattaaagtggatatcgtggaaggtcagaagacaggttacttcttcgaccaacgcgagaatcgtgcagccattgaaccgcttatgaagggttggggctacaagagtggaatcacactacaaacgaccgagcaggatggcatagagcagctcttgcctgtgaataaaagcggtaaagtagttacattcccatattgggatggtgccactgtactggagtgtttctcacacacgggaagctttacgttgaatgcttgcaagtatggagccaaaaaagtgacttgtcttgatatttcggagcatgccattgagagtgcacgaacaaatgtggagctgaacggattcaccgaccgggtcgaattcgtagttgccgatgcattccagtacttgcgtgaacaagtgaaagggctggatgaacgtactgcacgtgcgcgtgctgccgaacagaaagtagatacgtccaaagcgcttgcagctggcggtaaaacatttgatgtggtcatccttgatcctcctgcatttgccaaaacgaaatcagcagttaaaggtgcatgtcgcggttataaagatatcaatctgcaaggaatgaaactggtcaatgagggtggatatttggtaacagccagctgttcgtatcacatgcgtcctgatcttttcttggacacgattgctgatgcagcggaagatgcaggcaaagtgcttcgtttgatcgactggaaagcagccggtaaggatcacccacaaattttgggcgtggatgaagggcattacctgaaatttgctattttcgaagtgcgcagtaaaaagaattaattgtatgatttccgttccaatcaagtatagatcaagtcaaaagtccacagtgtgatggctgcgggcttttttctgttttgctgtgtttacggagatgatctccggttttaccggatagtggcaaacgtatgttccgaaccaagtcagatatgttatactgggaattaaaatcttgtacgtgtggtttggaggattagacatgtccgttcgttttgttattggccgggcaggcagcggcaaaagctcgctgattacccgggaaattacatccctgcttcaacaagaaccgcaaggcacacctttgattttgctcgttcccgaacagagttcttttcgaacagagcaggcattggtgtcttctggagcaattaaaggtaccatgcgtgcagaagtgctcggctttcgccgtttagcctatcgtgtaatgcaggaagcaggtggttctgctcgtattccgatcggagccgaaggcaaaaaaatgctgctctataaagtaattcagcgccgtaaggaagaattgaagctgtttggtgcatccggcagccagctgggttttataggcgaattaaatgacttatatagtgaatttaaacgttatgaagttgatccatcattgctggaagaagggatgtctggagggaatacctcatccacttcgccgattctggaggacaagttgcatgacttgaatctgatatatcgtgactatgaacaggaattgaccaatttatatattgatgatgaagacacgttgaccgagctgacagatcgtttgtcggaaagtgcattgctgcaggatgcccaaatctggattgatggttttcagggattcacaccacaggagatgagtgtgatcggtaggctgatgttgcagtcctcttccgtgacgattgccctgacattggatcgtccttatgatcacggcgcactgcctggagaactggaactgttttatcccacggcaagtgcctatgcgcgtctcaaagggatggctgaagaactgggtgtaccgagcgatataaccgtgctagattcggagattccaccgagatacaaggatcgtccgggacttgctcatctggaggctggtttcgaccggcgaattcgttggaaaagtgaaggccttgattccggaatccgactggttgcagcggagaaccgacgagctgagatggagggggcactgcgtgagatgcggcgcctggcacaaaacgaaggtgcgcgttaccgggatatggcggtacttgttcgtcagttggatacctacgctgatatagctgaaccgttattcagggattatgacgtacccgtctttctggaccgcagaagaaatgaacttcatcatccattatccgagtttatccgttccgcactggatattgttcggcgccactggcgctacgaggatgtatttcgctgtgtcaaaacggatttgctgcttccgcgtgatggttccatcactcgtgaagatatggaccagcttgagaattatgtactggcttgtggtattcacgggtatcgctggactgacggcaaaccatggaagtatgtaccaagcctgtcgctggaagacaacggtcaggatggccgtagtcgaggacgggaccagatgctttctttaatggagagctgccgaacggtcattacagattccttgggtgcttttgagaaacgaatgaaaaaggcaaagacagccaaagcccagtgcgaggcactatacagactgctggaagatgctgaaatcccatggaagctggagaacatgtctgctgaagctaaggcacaaggtgaccccgaacggtcgagagaacatcggcagatgtggggagctgtgctggatttattggatcagatggtcgatatgatggggaatgaacggctggatatcacgctgtttgccgggatgattgagaccggattgacggaactgaagctgggtctggtaccaccagcacttgatcaggttttgatgggttctatggaccgtacacgccttcaggacatcaaatacgtatttatccttggcgccgttgatggtgaattacccgccgtacctcaggatgatggcgtattaacggaactggagagagcgttactgacggaaagaggcatggcgcttggaccaggtgcaacaaggcagatgctggatgaacgtttcctgatctatacggcacttacagcggcaagcagccagttgtggctgagttacccggttgctgatgatgaggggaaagcactgcttccttccgagattgtccgtcatgtacggaagatgtttggtttacaagaacagccattgctcgctcaaccgccggttgcgaactcggaagaagcgcattggtcctatgtcacccatccgggtcagagtctgtcaacgctcattggacaattgcgcaaatggcgccgcggagaagacatccctgaaatgtggtgggtggtctacaattggcatgtatctcgagagacaagcagacctcagctggaacggttgatgggatcaatcttttatcgtaatcgggcattaccactacgtacagttaccagtcgcagactgtatggtacagaggtgaggacgagtgtctcgcgaatggagcggttcgtcgcttgtccgttctcccattttgcttcgcacgggttgcgtctcaaagaacggcaattgtaccgccttcaggctcctgatatcggacagctgtttcatgctgcactaagccagctggctatgcggttgcgtgaagaaaatcgtagttggggcagtttgactccagaccaatgccgtcaggaagccgagcaaacggtggagcagattgcaccacagctgcaaggggagattttgctaagcaccaagcgatacggttatattttccgcaaattgaaggacattgttagccgggcatccgttattcttggtgaacagtccagacgcggaagttttgaaccgattggattggagcttgattttggaccggataaaacactgccgccactacgttttgaactggagaacggctgtgtgatggagatcgtgggtcggattgaccgtgtggatgtcgcagaaggagagaatggtctgctcctacgtgtcattgactataaatcaagccagacggacctcaagttacatgaagtgtactatggtctgtcattgcaaatgctcacctatctggaggtgctgcttagtgctgccgaagaatggcttggggaaacggcgatgccgggaggaacgttgtatttccatgtgcataacccgctgttgcaatctgcaaacggcatgacatcagagcaggcaggacaagaactactgaaacggttcaaaatgaaaggtttgctgctggcggatcgggacgcaatcgctcaaatggacaacactctggataaggggtattcagcaattattccagttgcccttaaggcggacggaagcttttatagcagcgccgctgtagctacgccagagcaatgggatacgctgcttgcttcagttcgcagtaatatccgcgagattggtacccggattacggatggggatgtggccattgagccttatcgtattcagcaggaagtggcgtgcacgttctgtccatataagcctgtttgtcagtttgatgagaatatagaaggaaatgagtataacctgttgtccaaaccgggcaaacagcaaatctgggatatgttatctcacaccaagggaggggaaacatcatgacgaatatgccaaaaccggagggtagcttctggagtgatgaccagtggagtgccatctcggaaagcggagaagacattctggttgccgcagcggcgggatcaggcaagacagccgtactggttgaacgaattattcgcaagatcgcagatccctcccaaggattcagtgtggatcgtttacttgtagctacgtttacgaaagcggccgccgccgagatgaaacaacggattcgggaagcgttggaacgtgcgctagaagaacagcctggagaagagcatctgcgtaagcagctgtcgctgcttggacgggcatctattacaacgctgcattcattctgtatggaagtcattcgccgttattatcagcaaattccgttgaatccggcttttcgtatcctgaatgaaaatgaagcggaaatcatgcggcaggaactgcttgaagaactatttgaggaaaagtatggcgaagaagatgaagggaatacattccgcgaattagtggactggttcagtggagaacgaaacgatgatgcgatgcatcgactggtgcaacgtttgtatgatttctcccgcagtcattcctggccggatcattggctctcagagatggcatctgcttttcaggtggaaagtgtagaggcacttggacgttcagcatgggttcagagtattttgcgtgatgcggctcttgctttgagtggtgcagcaggattgatccgtcaaggcattcatatttccatgcagcctgaaggtccggcaccttatgcagatacgttaaaagaagacctggtgatggtggaagagctgctgtctgcggcccaggttatgccatgggaaaggttgcctgaagtgtttcaacccgctacatttggcaaactgaaaccttgcaagaaagatcagacggaccctgctttacaagatcaggtgaaggaactccgtgaggccgcgaaaaaggcagttaccgacctgaaaggttcattgttcggaagaagtgcatttgcgttctggcaggagttggagcaagcggcaccactcatgcaggagttgtcgaggttggttagtacatttggagaacgttatcgacaggccaaacaggaacgtgggcaagttgacttcagtgatttggagcattactgtcttcacattttgcgacatgaggactcaacgcctgaactgtcgatgccttccgatgcggctatggagtaccgttcgcgattcgatgaagtgttgcttgatgaatatcaggataccaatacggttcaggaagatatcgtgaaactgatctccagagaaaacccgggtaaccgattcatggtcggtgatgtcaaacagagtatctaccgtttccggttggccgagccaggtctgtttatgaacaagtatcgccagtatggagcgagcacaaatgaggacggaatggtggaagatcgtctgcatcgtacaggtcaacgtattgatcttgcgcggaatttccgtagtcgagcagaagtcgtgcattcggtcaatatgatattccggcaactcatgaacgaaggtgtggcagagattacttacgatgaacgagctcaactggcatatggggctacgttcccgtcagaaacacttggtgatgaggcgtatacacctgaactcatgctgatcgatcgtcagggtggtggtcctgatctgacagagagtacggatgagaatggggatgcatcggtctccgcagaactggagagtgccgaacttgaaacagcccagttggaagcgagggcaatcgcaaggcgtattcgggagatggttggagacacggacaaacctgcccttcatgtatttgacaaagccctgcaaacgatgcgcccggcacgttacggtgatatggtcatcttgctgcgttcgaccttgatgtgggctccgctcatgattgaggaatttagacagcagggaattcctgctcgaggagaacagagcaagggttattttcaggctacagaagtggaaatcatgatgtctctgcttcagcttgttgataatccaagacaggatattccgctcgcttccgtgcttcgttccccgattgtcggactggatgaagaggaactggcacagattcggcttggtgacaaaagacaatcattctatgatgcggttatatcggctgcgggagattggagcgattcctccactaatgccgtacagcaatcccggcaggataatcatcctgattccaatatggtccagttgcagtggccggaagcctgggcagagatggaacagggacagcgggagacagcagcttcagtcgaggcagagatcctggatgatgtctatgaatccgatgtgcatagagtgcatacagatggaatgcaagatgctggtgttgcgggacatgcaagtgaggatctggacataacggagatctcaggctcggagctacagcaaaagttaattcgttttatgcgtcaattgcagcagtggagacttgaggcaagacaaggtagtttaagtgaactgatctggcgtatgtatcgggaaaccggttatttggactgggttggtggtcttccaggaggactgcaacgtcaaagtaatcttaaggcattgtacgatcgcgcacgacaatatgaggaatcaactgcgaatcgtggcttgttccgtttcctgacttatgtctccagactgcgggaaaacgggggagacctcgggactgtagcaagtagttctggtgagcaggacaacgccgtacgtatcatgaccattcatcggagtaagggtttggagtttccaattgtctttgtcggtggcatatccaagatgtttaatcagcaggacttgaacgcaccgtttctaatgcataaggaactgggatttggtccgaggtttgtggatcgtgagaaccgggttgcctatcctacattagccaatctggcgattcgtcgtcgtgcgcaatttgaactgcttgctgaagagatgcgtgtgctgtatgttgcgttgacccgtcccaaagagaaaatgattttgctgggtactgtaaaagatgccgcgaaaaaagcgctcgcgtggtctcaggtcaaggatagccctgaattggcattgccagactatctgcttgttgctggacggagttacctggactggattggaccatccctgatgagacatccagatgcggctgtgctgcgtgaacttgctggaagcaatgattcgttctcagcttgtcttgcagatgatcaatcacgatgggcgatctctattatttccgccgatcaggtatcccgtgaccatgtggtagatctgatactcggagaagaagacgggataaatgaggtacggaaagaacgaattgctgcactaaaagccgtccaacccgtgaagttggttacatcttcaactgtagaagagctgacgaagagtgcacaagatacggctaaccaaaacattggagatgaaggtgcagacatagtagctcttcaacaagaggagacacggctgatcaacgaggttgatcaacgactttcatggacgtacccttatgaagcagcaactcaagtagcagccagtacatctgtcacggagttgaaaacgttacttgcgatgcaggatatccagtccgtagaggtgatggaggaactgggagaacagtccgagaaattattgactcacaacaacccaggaatcaattacaccaatgatgaagcaggccatgtactacgtggcgtatccgatgaatctaacgagcgtgagactggatcatggacagattcaaacggtacggtgaaccttccggatgcgggatctgcgggtacgtctttcaaactgcatctgcgtcgtcccaaatttatgggagagaaacaattgacagggacagagcgggggaccgtgtatcatacgttgatgcaacatcttcctgtagatggatcggccattgattcacagcttattgagcagaccactcagcgattggtagagcttcagattttgctgccccaccacgtggaggctatcgaactcgaagaactggtcgaatttttcgatacagaaccagggaaagagctgttgcgtgcagcgtgggtaaaacgggagattccgtttgtgtatggacttccggcacatcagtcccctgtggaatggctacatgcgcagtctacgaactcagaaatccagactgtagatgaagaaaataaaatgcaggccacgattgaaaatgaaacggtgttggtccggggaattattgactgtctgtatgaggtggacggtgagcttgtgttgctcgattacaagacagatcgggtgttggaccatcgcggtggattggaaaaacttacggaaaactatggcttccagctggagctttatggacgggccattgaagatatattgggtcggaaagttgaccggaaatggctgtacttttttgatggtggacatgcagtggaattgtaaaaagatcggaattcaaaaccatggatatcacatgggagaggggtggaacggacgatgcgtattttgcatacaggggactggcatttgggaaaaacgctggaaggacgaagccgactgcgtgaacaggaagatttcgttgatgaactcgtcagggtcgctgatgagcagcaggcggatgccatattgatggccggagatgtgtatgattcggtgaatcctcccgcagcggcggaacagcttttttatgaagcggcagcacgtctgacggagcatggaagacctcttgtggtgattgcaggaaatcatgatcagccagaacgtgtagcttctgtaactccacttgtgaacaggcagggcattacactcgtagggatgcctacttcagaagcggtaaccatccatgcaaagcgaaccggagagactgcacagattgcggcattgccttatccttctgaagcgagattgaatgaattgctgaccacggatggggacgaaaatgtgcttcgtcaggcatacagtcaacgggtgggtatgttaatgcagcgtctggctgcttcttttcgcccggataccgtgaacttggccatgagccatatctatgtgctcggcggacttgagagtgattcggaacgtccgattcagatcggtggggcctacacggtggacccttcatctttatcgactggtgcgcaatacacagcgctcgggcatcttcatcgtgcacaggctgtcaaaggagacggtgtgattcgatatagcggttctcctctggcctacagcttctcggaagcggggcaaagcaagtctgtcacgatggttgatctggcaccgggtggagctgcacaggtagaagaagttttgttaacgtccgggcgtccacttgtgcgttggcaggcgcggggtggtctggcagaagtatatcgctggctggacgagggacgtgatccgcaggcttttatcgacatggaagtgtggctggacgaagcgatgtccctgaaggagattcagcagctgcgaaaatcacatgaaggtatcattcacatacgccccgtgtatcctgagatggctgcagcaggacttttggagcaacgatccgagctacctgtacatgaactgttccgtaaattctatcagcgtcagaccggtggtgcacagccggaagacagcctagtacagcttttcctggaacttgtggatgaagacgagccgggtgtgcgtgaggaggtcgaggaaagatgaagccaattctattaaaagttgccggactgcaaagctatcgggagatgcaggagattgattttaccgtgctgacggagacgggactattcggtattttcggtccaacgggtagtggtaaatcttccttactcgatgccatcacactcgccatgtacggaaaagtggaacgcgcggtgaacgggacgcaaggcattatgaatcatgcagaggattcgttgtcggttgcttttacatttgaactgatgtcggcggaaggcactcggaggttccgggtagagcgacgtttcaaacgaaataatgaagtgtcggtgagtaacacgatcagcaaattcatagagacggtcaatggcgaagaacaggtacttgccgacaaattggcagatgtgaatcgctgtgttgaagatgtgatcggtttgaagatggatgattttacacgggcagtggtgcttccgcaaggaaagtttgccgagtttttgtcactcaaaggcagtgaacgccgccagatgctgcaacgattattccatctggagaagtatggggatcagttggctatcaaattaagtcggcgggtcaaggataatgatatggttcaccaatctcttgctgcggagcaacagggactgggcaatgccagtaaggagacgttggaagaaacgaaacggcttcttcaaaccgctgttcagcagtctgaattgtcccgcaaagcgctggatgaagctgcgaaggaagctgaacaactgggcaaaatccgtgagttaagtaacgaacggcaggcccggacggatgaacagcagaagctgaaagcactggaaccacagatagaggcaggcgaacagcggctgaaacaatccgttgcggcagatgcaatactgcctgcattgcagacggttcgagatgccacggctacacagaagcagcggcaggatactgccgagacagctcatcagcaagcactggaacatgagcgtctggctgttcaggaagcggagaaggctgagacggcacgcaagcaaatgactgaggaagaaccgaaacttctgctgcgcctggagcaactcgaacaagcaaaagagctgcaacgtgaacgggacggacttcaagctgattgctcgcgcctcgcgcagttgctggaacaggggcagagcgaacaaactgcgctgggacagcagcttgagaaagaaaaggaactgcaacagcgcggacgcaaacggcgagaggaactacaggagagcctcaagccaaatgaagtgaagtcagaggaacgcaggcaacttcaagctgcgctagaactgaaacatcgtgtggatactgccgcggagcagttgcagcaaaataaggctgacatgcaagcctataagcaatcggcagaacagggagccgacaagctgaaggcggcggctgaggaagaaaaacgcctgagtgatcagcgtcagcatctggtagaacaggcgtcagcaggtcttgaggccttgcttgcctgtgagcaggatattagccgcgaacaaagcctgctggcccttgcggaggaacagctgcgtggcacgatgcgcgagcaggagctacaccggctgtcctccgccttgcgcgccgaactgcacgacggcgagccatgcccggtgtgcggctcgccgcaccacccgctcccggctgcgccgccgggagaaggtccgcacgcaggggatgcggacctggaactgctgcgcagcctgcacgcggagctgcaggagctgcgctttgggctgcgccagcagctgcacgaacgtcgcagcctgctgacgcagcttggcgctgcggccggcgaagctcctgccgcagccgaggccgcgcctgcggcagcggagcccgagcccgccgggtcgcccgaacacgggcgctccccggcaggctgggcatcgcgtgccgctgcgctgcgcgaagccgcgcaggcgctggctggcgcagcagcgccgctccaagccgaagccgccgcgttgcagcaggcggctgtgggcgcgcagcagcgccgcatggaagcggcagctgcgcaagaggccggccgtgccgggctcactcaggcggagcgtaagctggccgagagcgaggccgcagcggctactttgcagagccgctgggccgcggaactaccgggcatcgctcaggaggaggccaaggccctctatcaggcgatgcaggagcgcgatgcgcgcgccgaagacatcaaggaacgtctgaacaaaagcgtgacgttccttgaggaaaaagaccaaatcattcaatctctccagcagaagctggtggaattggacaaacaactgattcagtggcaaacggagtggcagggcaatagcaaacagctggccgagaaggaagaacgcttgcgccagtgggttggggagcaacgggtagaagatctgattactgcggctcaggctcgtctggatggactgcggaaaacagcttcggactcggcacaacgcttcaaagaagcggacacgctgaagcaggaatcagctaaaaaagacgttatggctcaacaggcagccgcctcggccacagaacacctgcaacaggcacaggaacggtggaagcaattgctggaacaatctccgtttgactcggatgatgctgttgtatccgcggcaattccttcacaggaagcagagcgactggcaggggagatccagcagcaccgtgaacgtgagcgtgaactggcatcccagttgcgtgaattggaacaaaagctgggtggtgctgtcgtatcagaggaacagtggttagcctgcaccgaacgtttgcagcaggttcggattgaggatgaagctgcgcttcgtgccaaagcacgcgcagaacgtgatctggaggatgtagagcagcgacatgttcgctggaccgaactggagaacaagcgggtggaggtaagccgccaaggcgaactgctcagcaaactgcaatccgcgttcagaggcaatgcttttgtcgagtatattgccgaagaacaactgatgcaggttagtcatgcggcatctcagcgtctgcgtttcctgaccaaacaacgttattcactggaggtggattccggtggtggttttgtaatttgtgatgatgccaacgggggtgtcaaacgaccggtatcaacgttatcaggtggcgagacgtttctgacttcgttgtcactggccttggcactgtcggcccagattcagctgcgaggtcagtacccacttcaattcttcttcctggatgaagggtttggtacacttgaccctgagctgttggataccgtcattacgtctctggaaaaattgcatgacgaccgattggctgttggtgtaatcagtcacgtgcctgaactgcgtgcacgcttgccgcgcaaacttgtggtgattccagcaggtgaggccggaaacggctcacgtgtggtcttggagactctgtagagggcaatgtgtaagcaatatagatcatagaagtgcctctaatagtccaagcaaaatgaatattagaggttgttcaaaaagtccgcttttgattacgaatggtgcctattaaacacgcactattacgtaatattatttttgtgaaaatatttcttttcttgctttgataacttagcggagtgagttacatcacagatacaggttcatcccgctgttatactacagttaagccgacaaactttatttaagtaccccggcggacatctgatcaggacgtttcctgaatagatgtccgcgcagcagacttccaaggaagccgctcacggggtgcttctttttttgtgttttttcgtcagtagtgtcaattcgcccagttctgaataccatgaaaaggtgatcaagagcagaatcagggaggcgttggcaagtggaaaaagtggaagcaaagaaaatatgtaaggaacacatgcaccgttatgtatgtgtacagatgaatgacggtatgcactacgatggcattatggaaaatgtggatgacgaaatgatctacctggctgttcccgttggaccagaagccatggtgaatcatgcgaactgggctccaaatgcaatgcctggagcaaactatccgataggtcatactcgcggattttatccaggttacggctaccctacgccttatccgtattatggttatggccgtagacgttttaaccgactggtgctcccgttatttgcgcttacagcgttaactcttttaccgtattattgaaattagaaaaaacagtcataactgcaagtgacacattcttatgtaccctatgggcatcctatgaaaatcctcgaaaataactagctgaggatggatgtttcattcatggtaccgtacagcatgaattagagaggtcttatcacatacagagtctcagcctgatgtatcgcaacagtctttgcaatacaactggcaacataccgaatatctaaaaaggtcatgcctgtgcagaagcgaacttctgtaaggcatgacctttttttgaatctaattagtgtaaggtcgatgatgaacggatggcacataacgtgtatttaaacctactgaaagcagacctggcctgaacgtccgcagcagcaatcggtgtactgcatcctgaatatgcgagaacgtcctatgtgcaagtttacgatcaagacaccgaaaagctttaattctctatcccgataaaaagcttcgcttcgggtggaatccatgctgttctcttgccacgattggaggagcaaagcatgatgtgaatgctgacgaatctgaggcatcttaatcaagcctttgaagcgcccgcagaattttaaggaatctgagacacgttaaaaccgaataaacagccgctttaagcatttttttgagttatttcgagaaataacgtgcctgatgttccttataatttcaaattagcgcctgaacgccaaatgagacgtcctgtgttccttagaaaatggtcaactacccattcgcaagtatcagccagcacggacttcaaaatgcccttaacttaatgcagatttcaaatcctcaagtaaatcttcaacatcctcgatcccaacggagatccgaatcaaaccatccgtgatccccaattcttgccgacgttcataaggaatggaggcatgcgtcattcgggcaggtacagagattaaactttccaccgcgcctagactttcagccaatgtgaaataacggactttgcttaacacgtcatctactttttcagcactgcctacatcaaaggaaaccataccgccatatcctctcgcttgcatggaagcaagcttgtgctgcggatggtcgggcagtccggggtaataaactttactcactgttggatgctgattcagaaatgtcacaagctgctctgtattgcgctcttgcgcttccatccgcaatcctaatgttttaagacctcgcattaacagccaggaatccataggtcccagaactgcgccaattgcattttgaataaaatgcagatcttcaccaagttgctcgctgttgacaaccgcaagtcctgccacgacatcactatgaccgccgatatatttcgttgcagaatgtaatacaatatctgcccccagagccagcggggtttgccaataaggcgtactaaacgtgttatccacgatgaacaacaattcatgttgttttgaccatttcgctacagcagcaatatcggtgaccttgagtaacggattggtaggtgtttctacataaatggcctttgtattggattgcaaagcctcctccagtgcttgtagtgaggtggtatctacaaaggtagactcgatccctagacgattcagcaccttggtgaaaatgcggtaagtcccgccgtatacgtcatccgtcagaatgacgtgatctcctgtttttaacagagacagtacagcgtgaattgcagccatgcccgaactaaaagcaaaacctcgaacgccatcctccagctctttaatgacttcttccaacgcatgacgggtagggttgcctgtacgtgaatactcgtatcctttgtgtacgccaaccgattcttgctcatacgtgcttacttgatagatgggtacactcactgctccagtgtgtggatcaccaacaatacctgcatgaatcagcttggtttttggtctcatttcattgtcctccattatagatattttggcttaaataccgttcgctgctatccgggaaaataacgacgatgttacttccgggagctgcgtgaacagcttcgtttaatgcggcttgcatagctgcacctgaggaacttcctaccagtaagccttccaacaaggccagatccttgacccgctcaaaggcatcttcatctgagatcgtatgaatggcatcaaagtaactcacatccataaaagaagataacgtttcgacccctattccttctatacgatgtggtcccgatggacctcctccgagaatcgaaccttcgggttctacgatacatgttttaattaacgggttttgctccttcaaatagcgagatactcccatgaaagttccgccagacccggctccggcgacatatacatccacctgcccgttcagatcacgccaaatctcaggacccagatgttcataatgtgcgagtgggttatctgcattggagaactgacctggaatatacgaacccggtatttctttcgccagcgattccgccttgcgtatggcaccagtgattccttcggatgtgggtgtgttgacaaccgtagcaccaagggctttcatcaactgctgcttctcaacgctgaacttctgaggtacggtgaaaatgacctttaaattcaggccaacagccgccattgcaagaccaattcctgtattgcctgcggtagcttcgatcaccgttccacctggcttaacatctcctcgtgccaaggccttctccaataaatacttgccgatcctgtctttcacacttcctccgggattcatgaattccagtttggcgaacaggcggattccttccggtaatggataacgagttaattcaagcagaggtgtattacctataagttcctgtacatgttgataaacggtcaaattaaccaatctccttttgtgtgtcattaaccatacatatttgtttaattgggaaaagtgcgtgataaaaccatatttcaataaaatggcttggtatacatccaatgttgtatagtgttcggctcgatgatagatggagagttgacctggaatacctggttgtgtgtctagagattggacgtgggtttttacttttagtatgatagaggggaatacatacactggaatacaaaggagggtatgaactatggattgcttattttgcaaaattgtagagggcagcattccctccaataaagtactggagaatgaccatgttatcgtttttcatgacatccagcccgctgcaccgacacatgttcttgtcattccgaagaaacatattgcttccatgaatgaagttactgcagaagatctgccattgatcggcgagattcatctggctgctcaagaagcggcgaagcgtcttggcgtggaggaaacaggatatcgattaatcaacaattgtggtaaggatggagaacaaaccgttcatcatctgcattaccatttgttgggtggtaccagacttggcgtgttaacaagtctgtccgattctcacaaataaacgagctaatgggtactactattgaggatttagtcatatgcattaaatccacgaatgtgtgaccaaatgcttatataatgaattcatttcataatacctttgagttataaaatggattcaaataagtgatcattacattgaggttgacacctttattatctttcgcctataatgtaagatgatgaaccgtgttattgctcttggacggtctggtcggagggagggaaaactggtgtctgaaactaaagttcgcaaaaacgagactattgatgctgcacttcgtcgttttaaacgctccatcgctaaagatggcgtattggctgaggtgaagaaacgtaagcattatgagaagccaagcgtaaagcgcaagaaaaagtccgaggctgctcgtaagagaaagttttaggaggattttaattacatgaatcttagcgaacgattgaacgaagatatgaagcaagcgatgaagagtaaggacaagttcagactctccaacattcggttgattcgttcgacgatcaagaatcttgaaatagatttgaaaagagatttggatgacaacgaagtgcttgatatcctgagtcgtgaaatcaaacagcgcaaagatgccctccaagaatttgacaaagcgggccgtgaagatctcgcggcaaatgcaaaagcggaaattgaagtactcatccagtaccttcccacacagcttaccgaagaagaaattaaagttattgtacagcagaccatccaggaaaccggtgcttcttcgaaagccgagatggggaaagtcatggcggcccttatgccgaaagttaaaggcaaagcggacggcaaactggtaaatcaagcagttcaacaatttctgcaataaagcaaatcaataaacaccttctgacttgtcaggaggtgttttttccatttatcagaaggcatgatgtccttgggatgacgaaatttctttttaatggttaatatatattaatatggatttttattcttgcaattgatcgagttttcaaatataattttaagattttgaaacgaaatgttgcattgcacgtaataaataccataagctggacagtataacattaatggaaaaggggggactattgtgaagggaaagcgccggaagaagcttacggggccattgatgctcttaatgctgctgacgctgttgcttcctgtctggattggatcaccgtcagcgcatgcagctgagaagagtggtgccgtatatattattccggttgataaaccaatcgagcagggacttggcaagttcatggaacgcgggttcaagcaagcagaagagatgaatgctggcctgatcgttcttgatatcaatacgccgggaggccgtgtcgacactgcagaagcattgggtaccctgatcaaggacagtccgattgagactgttgcatttgttcgtggagatgctgcttcagccgggagttttctggctctgaatgcagataagatcgtaatgtcaccaggcagtatgattggtgcggcagcaatggtcgacagtacgggtaaacatgttgatgatccaaagcttgttgcattctggaaaagcaaaatgcagggagcggctgaaatcagtggtcgtgatggcaagattgcagctggaatgacggatgttaacatcgttgttgaaatgccagagatcaataaaaccaagcaaaaaggtgaaattattgctctctcggctgaagaagcgctgaaagttggttatgccgaccacatcagcaacacaccggaagaagcggcagcttgggcaggttacagtcaagatgacgtatttaaggtagaacgaacaacagcggagaatatctcctcttttcttactaatccggttgttatgactgtgttattgttcctcggaatcgcgggtgtgatcattgaattgattgttcctggttttggagttcctggtattgtaggtatcgtgtgtttcgtgttgtatttctcgggtaattacattgcgggatttgccggagcagagacatgggtgctatttaccgttggactcatcatgatgattctggagatgtttattccgagctttggtattctggggattttgggatcaattgcgcttgtggccggtgttgtaagggctgcttatgatacgagtgatgcatttgtatctctgggtatcgcttttggagcagcactggtagtcattgcgatcatctcaattatctttaaggatcgagggatatggaatcgcttcatactgagtgacagcatgtctgcggatcggggttattcatcagccacagaacgtaaagagctggttggtctgcaaggaatcagtctgacaccacttcgtccttctggaacagcgatgtttgaaggggaacgaattgacgttgtgaccgacggagattttattcccatcgatactccgattattgtgattaaagcggaaggtacccggattgtggttcagcaagctttgccggtgtaactcgctctgttgtcgaagcggattaacgcttcggcaatgtacataaccacatgctgaagctgccagcgaggtggtgtattctttcatttagcagcggactcatgattgtcttctcaaacatttttatcaaattcaaattgcaaatggaggaaattaaacaatggacacatctatgattacgattttgctcattgcggtagtaggtattatcgtattgagcgtattcttcagctttttcccggttatgctctgggtttcagcgattgcatccggcgtacgcgtaagtattattacactggtagcgatgagactgagacgtgtaacgcctagccgtatcgttaatccaatgattaaagcaactaaagctggtcttaaactttcaatgaaccaactggaaagtcacttcttggccggtggtaacgttgaccgtgttgtaaacgctctgattgctgcacaacgtgccaacattccactcgaatttgaacgtgctgctgcgattgatctcgcaggtcgtgacgtattacaagccgtacagatgagtgttaacccacgagttatcgaaacaccgattgtctctgcggttgccaaagatggtattgaagttaaagttagagcacgggttacggttcgtgccaacattgaccgtctcgtcggtggtgctggtgaagaaacgatcatcgcccgtgttggtgaaggtatcgtaagtacgaacggttcctccaattctcacaaagacgtcctggaaaatccggatctgatctcccgtaccgtattgtccaaaggtctggatgcaggtactgcttttgaaatcctgtccattgatattgctgacgttgatgtaggtaagaacattggtgccttcttgcaaacagagcaagcagaagctgacaaacgtatcgctcaggcaaaagcggaagagcgtcgcgcaatggccgtagcccaagagcaagagatgaaagcacgcgtagtggaaatgagagcacgcgttgttgaatccgaatcccaagtacctttggcaatggctgaggcacttcgtaacggtaaaatcggtgtgatggattatatgaacctgaagaacattgaagcggatactcaaatgcgtaatacattgggaaaacctggtgaaggttcgaattccaacgatcagggtgattccaaaaacggaagataggcggtgagtgcatatgggcctatttgaatggatttttgataatctgtatattgtggccgtcatcggttttgcactcttctccttcttggggaaagctgccaaatcggctgatccgaacaaaaagcgtcctgccaacgggatgcctacatttggaggcagtggtgattcaggccgggatgaacgttcaagagacaattcatctccgcagcagtcttccggacctacagacccccgctatgatgaacagtatgacgatcggtatgatgacgtgcagtatgagaatcagtatgatgagccgtattcggagcctgctgcatcttctcgccccgcaactgactacagaagtgagggcacgatgagtgcgatggcaaattcacttgaggaacagatgagaggcatggaagaacagcagcgtttgatcgaagaacgcttgaatcgcatctcttctgcgaatcggccagttgtgtctgattccagttgggatgagaccagcaccgatgaatcgggagcgtctccacttcgtcctgctgatattcgtacaggtgtcctgtgggcagaagtactgggttcccctcgttccaagcaaccgtttggtacaagaggaaaactgtaaacaagtcaatttattggacggaaataaagccgtctctggtgagcataaagccgccggagacggctttttctgtgttctatccttttttctcaacattcgtccctaacacgccccggaattttcataaattcatgaatctgcgcataagttgaactgtagaggaagggggaagaccttcgaatgacccggatcagccgcaagctgcgcagatggaccagtgaagtgttggatctgccgcaggatgtgctttatgatatgcctcggttaaccctgatcggcagtaagcaactgtatatagagaatcatcgcggtgtcatccattttacaccggatcgtatcgtgttggctctttcccaaggccagttagagatcaaaggaactgccttggtgatacgtaacattttgccggatgaagtagctgttgaaggaacgattctggatattcatatgaatggagtggaggggaacggatgaagcagcccagtctgtacaaactgcggggagcagtccgaatcacggtcactgggggagacattgaaacattaatcaacacggtggcagagcagggactggaagtttgggacctgcgtgctcacgatggacgcgtggcagagatgaatattcagctgccgcattttttcaggttgcgtcctatgttgaaacggacaggctgcagggtgaaagtaacccatcgcagcggtttccccttttttgcggcccgtttattgcggaggaagttctttcttgggggtatgctgttttttgtggcagctttgtttgcgttgtcttccatggtatgggatgtggaggtcaagggtaacgtcaccattcccaccgacgaggtgcttgcagcagcgaagaaagagggcatatatcctttccaatgggggttccgtctgcaaagccaagacaagctctccagacagcttgcactcgctctgccggatgtaacctggattggcgtcagcaaagaggggacaaccattaccattcaggtcgtagaatctgcccaaccaaagcgcgaaccattactgaaccccagacatctgatcagtaagtcagatgctgtggtcactcaaatctatgcggagcagggacgccctgttgttcagaaggacatgcgtgtcaaaaagggtcaggtattgatctcagggattctcggggatgaggagaacaccaaaaccatcgttgccaaaggtgaagttcgtggtctggtatggcgtgagtatcaggtagaggttccgctagtgcaaaaacataatacaatgacaggtgagagcaaagaacgtttttacatggtactggggaattgggcgattcaactgtgggggtacggaagtacaccgttcagttcatttgataccgagagtaatcataaaccattaacgtggcgatcctttacacttcccatgggttggctgacagagaaagatctggagacccgagagcatgagcaacaacagacgatagaatgggccagaacaaaaggattggaaggagcaaggaacgatattatcgccaaaaacggcaaaggaacaaaaattataagtgaaaaaattttgcatgagaagaaagagaatggtaaagtttatatgaaagtcttatttgaagtagaagaaagcattgcggaagaacttccgctagtccatagtcaaggagaatgaggatatttgtcagagcaaacacgcagcatacaaatctccctccagagtgcgggagagggccaatctctttttggaccccaagatacttttcttaaactgattgaatccgagattcccgcccagattgcatcccgtgaagcggagattgtgatttttggcaacgcacagcaggtggaatcgcttgaacaattatttgatgtgttactgcaattgatacgcaatggatatgtgttaaccgagagagatgtgaagtatgcgattgaacttgccaaggatatgcgggcagaccagctattggatctgttcaagggcgagattacaacgacataccgaggtaaaccaatccgtgttaaaaccattggacagaagcactatgtaactacaattaaaaaacgtgatattgtatttggcattggtcctgccggtacgggtaaaacctaccttgctgttgtactggctgttgccgcaattaaagaaggcagcgtcaaacggattgtactcacacggcctgctgttgaagcgggagagagtcttggatttttgccaggtgatcttcaggagaaggtagacccttatctgagaccactgtacgatgccctgtatgacgttatgggacaggaacagaccgcgaaggcactggagcgagggttaatcgaaatcgcgccactcgcctacatgcgggggcgtacgctggatgactccttcatcattctggatgaagcacagaacacaacgccggaacagatgaagatgtttctaacccgtcttggttttggctccaaaatggtcatcaccggagacgtgacacagattgatttaccgcgtggtaagaaatccgggcttgtggaagcgaatgcgatcttgaacgaagttaacgagattggatttgtctattttgccgagcaagatgttgtacggcattcccttgtccagaaaattatcgtggcttacaaccacgccgcagaaaatcaagcatagaaagggattgtctaaagtgacctcgaaggaaccgtcaaaaggcaaatcttttcagaataaggctacaggatggaagtatagcgtgtgggcacgctatcttctgtttttgtttctggtgattcttttctacgtgagtctggcttccaagctgctccctgagcgctatgatattcaggaagggacacggagtgaagtggatattgctgcgcccatgcagattccgaataataaggccacactcaaagcacaggaagaagctgctgaacgggtacagcccatatttcagattgtccagttacgaaacgaaaatttgattactaccctgcttgatcgtgtagatcgattaaatcaggatgatcagatttcaagtcaggacaagattgatatttatcgggatgaaattccgcagcgccagaaggattttgtgaccaactatatcaataataatcggaaagccggtacatactccgagactcttttggaagagatcagaaatgtggtacaggagcaaagctaccgtattcccgaagaaacttacatcaaaatctcacgtctgacatcggatgatattcaggagatgaaaccggttgcgagggatattgttgcccggttaatgacggatcagatcagcgatgcaaccactgctcgtgccaaagtagctgagatggtgagtgtcagctctctaggtaagcgtacacaacgtgaggtcgtgcaagagcttgctcgcctcgtggtgaccgcgaaccgcttctacgatgaagagggaaccaaggaagccaaagtacaggcgcgtgagaacacgcaaaccgtctttatcaagcaaggggacacattagttgccaagggtgagatgatcaccccggagatgtatactttgctggatgagaatgatttgctgaaaaatgaagtgaactactggccgcagcttggacttcttatgttttcctgcctgttgtcagcagccattctgatgtatattcagcaaggcagcggaacacatttcaaatataataatgctcagctgttgatgcttgttctcatttttattattacgattgtggttatgcatgtgacggcgattatccagaccaatgagaggtcttatgttggcttccttgcacctgttgcggtaggagcgatgttaattgccttgttactggatacctcgcttgcctttgtatgttcgattttgatcggtatgttgtccagcattattttgaatacgcatcagggtcaactttttgacttcgaactaggtttctttgctgtattggtttcatttgttgcgatcttcgcaactcataaggctagccagcgatcaacgatcctgaaaggggccattatggtctgtctgttcgggtccatagccgtcttcaccttggctttgattgactcgggcgattggaatcgaaccacgacactgtacggcgttgggtttgcatttgctggtggggtgctgactgccatactggtcattgggctgatgccatttttcgaaacttcatttggcattttgtcagcgctcaaactggtagaattatctaatccgaaccatccgcttcttcgcaagttgcttacggagacaccgggtacctatcatcacagcgttatggtagggaatctgtctgaagcagcagcagaagccataggagctaacggattgctctgccgagtgggttcgtattatcatgatattggcaagacaaagcggcccatctattttattgagaatcagaacaatatggagaatccgcatgattcaattgatccgaaactgagcaaatccattatcgttgcccatgcgcgcgatggggtggaaatgcagaaggattataagcttcccagacctattcgggatattgcggaacagcatcacggcacgacatttctccattatttctatcacaaagcactgcgccaggcggaagaagcaggcgtagagcctgatttcacggaagaagatttccgttaccctgggccgaaggctcagtccaaggaatcggctattgttggcattgctgatagtgtagaggctgctgtgagatctttgcgcaaaccgacagtggagcaagtggagtccatgattgagaagattattaaaggacgattggatgatcatcaattcaatgattgtgaccttacgatgcgtgaactggatatcgtcgccagaacattgaaggaaacggtgatgggtatcttccactccaggatagaatatccggaggagatcaagaaaccaaagccaacttcacccgaagcaggctaattcaataatagttcgtgttcaaaaaggccggttttcagtaccgagaagatgggatgaagctagaaatgctttttttgaacaacctctaatatgagcagacaggagttatgaaagaatgagtcttaacctggcatggaataatgaacaacaggacaaagaaattacagaaccgatgattgcaatgctggaacaattgctgaatctcgcaggagaagcggaaggtgttgcagacggggaagtggctctgacttttgtgaatgatgagcagattcatgagttgaaccgtgattatcgcggcattgaccgtcctacggatgtactgtcttttgcgatgaacgaaacggtggatgaagaactagatattatctatgagctggacgaagatgaagaaatggaagaaatgccggatgttcttggagacatcatcatttccgtaccacggaccatcctgcaaagtgaagagtatggacactcatttgaacgtgaacttggttttctgtttgtccatggtttcttgcacctgctcggatacgaccatcaggatgaagcgagtgaggctgaaatgatgggcaaacaagaagcggtattggcccaggccgggttgacacgataatgaaaagacgctcctggggtctggtattccgcaatgctgcggaaggaatcgcatatgggttgcggactcagcgtaatgtgagagttcacacgggagtggctattttgatgtgtgtagccggcttttttttcagaatctcaagaacggattggatgtttgtgctgaccgctgtctttttggtcctggtgactgaattgatgaacacggctgtagaggcagcggttgacttggcacacccccatatccacccgctggcaaaagcggcaaaggataccgcggccggggcagttctgctggctgcggtattcgctgtcatcatcggttgtatcgttttcattaagccggtgatgagctggctcggtttgtattgattttgttttaactttgttttgattcgttttgatttgattttaatactacacactaatataaatttacttgatgcaaacacgataacggagaggtcagaagaaacctgaagaaacggagtgtgcgcctttatccccggattttcccttattaaaagggatcaaaaaaatctggggataacagcgctcggaaggttgttctgacagcggagtgtccagtgtagatgcactagtttgattttatattgcaccctaagggagagattattaatggataacggtttgttaatgcaagaagcaattaaggcacgtacgaaggcgtatacgccttactcccattttggtgttggcgcggctttgcttgacagtgaaggtcatgtgcatcatggttgtaatattgagaatgctgcgtatacaccaggtaactgtgctgaacgtacagcgatgtttagtgccattgcaggtgggcagaagcctcgcagcttcacagcgattgccattgtgggagacacggatggtcctattgctccatgtggcgtatgtcgtcaggtcatgtacgaactgtgtgaacctgatatgaaagtcatcttggggaacttgaaaggtgatctgcaagagaccaccgttgctgaactgttaccttgggcttttgggccttctgatctgaattccgccaaaaaataaaccaatacattccaggcctaggcgcctgaggaggaacatatgaaaaaacaaaaattcaaatccggttttgtagccattatcggacgtcctaacgttggtaaatccactttgatgaaccaagtcatcggacagaaaattgcaattatgtcggacaagccgcaaacaacccgtaataaaattcacggtgtatatacatcggacaatcaacagatcgtttttctggatacaccagggattcataaacgtcagtccaaattaggcgattatatgaaccagaccgctttgaacacactgagtgaagtagaagcagccttattcttgattgatgcttccgaaggaatgggcggtggtgaccgctatattgcggaacagctgaaaaatatccgtacacctgtcattctcgtcatgaacaaaattgacaaaattgagccggaagcgctgttaccacttattgaagagtatcgcaaattacacgatttcgctgaaattgtgcctgtgtctgccaagcatggcaataatgtcagcacattactggaacagctcggcaagtatctgccagaaggtccacagtactatcctgacgaccaggttactgaccatccggagcagtttgtatgtgccgagttgattcgtgagaaaattctgcaaatgactcgtgaagaagtgcctcactccattgctgtaacgatcgaagatatgaaagtgcaagataatggtgtcgtttatatctcagcagtcatttttgtggaacgtgattcccaaaaagggatcattatcggcaagcaaggtgcccttctgaaagaagtgggtaaacgagctcgacacgacattcagaatttgcttggctccaaaattttcatggacctgtgggttaaagtgaaaaaagactggagaaatcaggatagagttctgcgtgaccttggctttggccgcgactaatcgtcggaattgtatccagtaattgcaacacatagtttaccttgcaagactccatcctatttggtagatgcagacgtcatttccgaagagaggatgaaattccgatgcgagatttttcgtggaaggtttttgcgatgacgggggatgtggagtcctatttgttatataccgaggcgtgtaactcgttaggacaggagtcggataatgcaagggaagtgattgaagatgaagaagccgaaggataattggctgattcgggaatggttaggtgacgaggcatgctatacagggtggaagggattgtcatccgcagcatggactacggcgaagggaacaaaatcattacactttgcaccgaaagcggcgggaaagtaggggtactcgtccgcggtgccaaaaagcccaagagccgacatgctgcactggtgcagccgtttacgtatggtcaatatgtatattttcgcaatacaggtctaggcacactgaacgctggagaaattgttgaatcctatcatgagttgcgtgaagatctggtcaaggcctcttatgcctcttatgcgtgtgaactattggatcgggtgcttcaggatgaggaaacaggtacattttggttcaaacagttaaaggcgtgtttgcaggcgttgaaggaagagaaagatccggttgttattacaagtctgtacgaaatgaaaatattacaggcatccggatatggtccacagttcgatgagtgcatctcctgcaaccaggagcgaccagatgagcagttgtttataagccccagacttggtggagtcttgtgtcgagcatgcaaacatttcgatcctccagcgatgtcagtaagtccaaaggctctgaagttgttgcgtttgttcgcacagttggatctgcagcgcttggggaatatatcagtgagtgagtctacccgtgatgagatcaaaaagttgatgcgtgcctttatggatcatcagctcggtctgaatcttaaatcccgttctttcctcgatcagatggagaagtacgggatttgaggcgttttggtggaagcgaaactatatcttgacttcatactagattttatatattatgaaatataatttctctttatgagacatgcattgaacgagaaagtaaaagactggatttattgcatttatggagacaagtcgtttgtataacacttggaaatcatgaatgagcgagccggggatggtgggagcctggctgaatcggtctttgaaacggcactcgggagcatgaatggacacggaaaagtgggctggaacgaacaggatcatcctgtttgatctaagccaagtagggtggaaccgcgggaatagctctcgtccctacgtctgtacaacaggcgtaggacgggggctatttattgttgtcttcaccgtcctaagcttgctaacaaaccattgaaaaggagcatgattatgaattttcagcagatgattctaacgctgcaacaattctgggccgagcataactgtattattgtccagccatacgatacggaaaaaggggcaggtacgatgaacccgatgacctttttacgctcgcttggacccgaaccttggaaagtggcctatgttgagccttcccgtcgtccttcggacggacgttatggtgagaaccctaaccggctgtaccagcatcatcagttccaggtcatcatcaagccttctccggacaatattcaggaaatttacctggaaagtctgaagcgtctcggcattgatccgctcaaacatgatattcggtttgttgaagataactgggagaatccttcccttggttgtgcaggtcttggttgggaagtatggttggacggaatggaaattacacaatttacgtatttccaacaggtcggtgggatcgagacaaatccggtagctgttgaaattacgtatggtatggagcgtttggcttcttacattcaagataaagagaatgtgtttgatctggaatgggtggaaggtatcacttatggtgatgtattccgtcagccagaattcgaacactctaaatatacgtttgaagtatctgatgtcaaaatgctgtttacactcttcaacatgcatgaagaagaagcaaacaaggccatggcgcagcatctggtattcccggcatatgactatgtgctgaaatgttcccacacgttcaacctgttggatgcacgtggagccatcagtgtaacggagcgtacgggttacatcacacgtgttcgtaatctggctcgccaagtcgctgcaacatatatggaagagcgtgagaagctaggcttcccgctgatcaagaaagggggagccgagcatgtctaaggatttgttgtttgaaatcgggctggaagaagtacctgcacgctttatgcgcgcagcaatcgcacagctgcaagagcgtgtcgtgaaatggcttgacgcatcccgcattgcttatggtgaagtgaatgcatatgctacaccgcgccgtctggctgttttgattcacaatgtggctgaaaagcaggaagatatcgaggaagaagtgaaaggtccttcacgcaaaattgccctggacgacagtggcaattggagcaaggctgcactcggattcgcccgcagtcaaggtgttgaacccgatcagttcacgttcaaggaactgaacggtgtcgaatatatctatgcaacgaagagcagcaaaggtgtggaaacagcttctgtggttggcgaaggcttgttatctgtattacatgccatgacgttcccgaaattcatgcgttgggcttcctatgatttcaaatttgtacgtccaatccgctggattgtggctatgctcggcagtgatgttatcgatctggaagtgacaggtgttaagtcgggtaacgtaactcgcggacatcgtttcctcggtaaggaggccgtgatctccaatccgtcttcatacgtggaagtgttgcgtgcagaacatgtcattgtagatatccatgaacgtgaacagatgattgtatcccagattcaggcactggctgctgagaaaaaatgggatatcgcgattaaggaagacttgctggaggaagtcctgttcctggtggaaacacctaccgtattgttcgggacatttgactcctcattcttgaatattccacaagaagtattgattacttccatgcgtgagcatcagcgttatttccctgtattggacaatgaaggacaattgttgccattcttcgtgacggtacgtaacggtggaagtgattcactggacgttattgccaaagggaatgaaaaagttctgcgtgcacgtctgtctgatgccaagtttttctatgaggaagatcagaagctacagattaaggatgcattgtcgaagctggaaagtatcgtcttccaggaagaattgggaacggttggagataaagtgcgccgtattcgcaagattgccgatggaattgctgccaaactgcaagtatccggtgatgttgccgaatccgttagccgctcagcagatatctgcaaattcgatctggtgacactgatggtgggagaattcccggaactgcaaggtgtgatgggtgaggattacgctcgtaaagctggcgaaaaagaagaggtgtccaaagcggtatttgaacactatcagccacgtttcgctggagatcaatcccctgcttctcttgttggtgccattgtgagtgctgcggacaaaatggatacaatcgtgggttgtttctccatcaacattattccaacgggttctcaagatccgtatgcgctgcgccgtcaggctgcaggtattgtacagattttgctggatcacaagcttccgctgacattgtcagacgtgttcggagtagcacttcaagtacatgcccagatgaacctgttgaaacgtgcagacgaagaggttcgtaaagatctgcaagacttctttggtcttcgtgtgaaaaaattgttgtccgaaaccgttcgctacgacgtagtggatgccgtaatttcttccggattcgatgatatcagcgctgtggttccaaaaggtgaagcgttgatggcggctgttatgacaggagacgcattcaaaacaacggtggaatcgttcaaccgtgtgggcaatctggcggccaaagcatccaatgcttccgtacatccagaactgttcacagaagatggagaacgtcagctccatgaggcatggagcaaaacgaatgcagaatatcgtcaggcgttgactcagcatgatgctgctgaagcactggctattgcatctgcctggaaggatggtattacctcattcttcgattcggtcatggttatggccgaagatgaagctgttcgggcgaaccgacttgccttgctcgcggctattgatcgtgacttgaaaggatttgctgatttttccaagttggtttggtaattggcgtatttcatgagtccttttccacagacttggcgcaaagctaaaattcagtattaaagaaggatatatgagggtataaatatacggaacgggttgtgaaatgtatttttgacaaccgctccgtattttagcctttgatttccctcgttccggcagaaggattttgcctggccggggtcgtatataacaatatgcagctattttatgaaaccgggtggtctgggtttgagtgagttaaatatacgccacattgttgtggatggtgatgcttgcccggtcaaaaccgagattgcgcaaaccgctcgccttttcaacatccccgtattgttagtctcttcatttgatcatttgcttcaaggaggagaaggggtacgaaccgtgcaagtggatcgcagtgatcagagcgcagacctgtatattgctaatcatattaagccatatgatgtggttatcactcaggactatggacttgcggcacttgcgcttggcaaacgttgttatgttttgtcctttcgtggtcgtgagttcaacgatcgtgacattgatttcatgttggattctcgtcatactgcggccaaagcacgaaaaagaggccattacgggaaaggcccaaagcctttcacagagcaggatcgagaaatgtttcaacataaactgacaaaacttttaaaagatttgcaggagaatgtgtaagtttatcgaattatatttacgtgttgaagagatgaaggtggccagagatgagtaccggacaaggcggtatacccgaaagtattattgaatcggtgttacagcagaatgatattgtcgatacggtgagccgatttgtgcatctgaccaaacaggggaagtatatgaaaggcctctgtccttttcattccgagaagacgccttcgttcaccgttacacctgagaaacaaattttctactgctacggttgcggcacgggtggaaatgccatcaaattcaggatggaaatcgaagggttatcctttcccgaggctgtcaaaacgatggcggaagaaagtcacatctctatgggggactggcaagggcgtgaatctgctcatgtgaatccggagacggaacgtctgttggaggcttatgagcttaccgcgaagctgtatcattttttgttgaaaaatacagagcacggcaagtcagccatggagtatttacgctcaagaggttttggcgacaagttaatcgaccagttccagattggttttgcaccaaatcgttgggacacactggtacaatttcttgagaaacgtaactatccgctcgaagagatggaaaagggtggacttctgtcaccccgaaatgaaggtcagggatatgtggatcgattccgagaccggattatgttcccgatcaatggcaggagcggtaaaccgattgcatttgcaggacgcatattgggagatgggcaaccgaagtatctaaattcaccggaaacccggttatttaacaaaagccgtgttctctataatctgcatcatgccaaaaatgcaattcgcaaacaaagacaagccattttattcgagggatatggtgatgtcatctccgcatgggatcaggatattcagaatggtgtagcggcaatgggcactgcgttaaccgagaatcaggcactgatgctcaaagggatgtgcgacgaagtcattatatgttatgacggcgacagagcaggacaggctgctgcactcaaaaacttccctattcttgaggaagctggattgcaggtcaaagtggctctcattcccgagggacttgacccagatgattttatccggaagcatggtggtgaacggttccgaaaccagattgtggacggtgccgtgacaactacaaaatttaaacttataaacttaaaaaaaagccatatactgctagagggtggcggacaaatcgcctattcgaaagaagcagtaaagttgattgcacccttaccttctccaacagaaagggaagtgtatcttcgtgaactggctgcagaagtggacgtatccttcgaaacattgaagcaggagtgtaatgaagaacgggaggcgatgaaaaataacctccagtttggggataataacccgaaaaggtggaataatggtaggcaacaaaataggcaggtgcctacacccaatctgttgccggcttaccacgcagctgaacgcaaactgatcgcctggatgttgcaggatgatgaggctgcccagtacgtgaatgagcatcttggtgaagcttttaacttggatgatcatgcagctattgctgcttatctatatgcctactatgcgcaaggcaaaccgtcggatacaagccgttttatgtcttcactgcatgacgatcgtctggaaaaaacggtcagttcaatctcgatgatggatggtccaggtgaatggagtattcaaatgctcgatgattgcatcagggaagtgctgaagcatccgcgtaagaaagagtacgatttgaaaaaagaagaaatgattgctgcagagcgggcaggtgattctgtacgcgcggcacagattgcaattgaaatgattgccctagagagacagtgaacgtctgatgattagatgtttctagggaggagggagtcgaattatggcgaatgatcagcatactgaactagaaacagaattgacactggatcaggttaaagatcaattgattgaatcaggtaagaaaagagcttcgctgaattacaaggaaattatagagaaactctctccttttgagcaggatgcagagcaaatggatgagttctatgagcaactgagcgatctgggtatcgatgtagtgaatgaaaacaatgaagaggttacacttcgtcctagtgaagattccgagaacaacaccagagagggagaggacgaattccactttgatgatgatctgagcttgccgccaggtatcaaaatcaatgaccctgtccgtatgtacctcaaggaaattggtcgtgtgccactgttgtcggcagatgatgaagtacaactcgctaaacggattgagaacggggatgaagaagccaagcgtcgtctggctgaagctaacttacggctcgttgtcagtatcgccaagcgttacgttggacgtggaatgttgttccttgatttgattcaggaaggtaatatgggtctgatcaaagcggttgagaagttcgaccacaaaaaaggatacaagttcagtacgtatgctacatggtggatccgccaagcgatcactcgtgctattgctgaccaggcgcgtacaatccgtatccctgtgcacatggtggagacgattaataagctgatccgggtatcccgtcagctgttgcaggaacttgggcgtgaaccgacaccagaagaaatcgctgctgagatggatctgagtgtagagaaagttcgtgaaattacgaagattgcacaggaaccggtttctctggaaacaccaattggtgaggaagatgattcccatctgggtgacttcattgaagatcaggaagcacttgctccggcggatgctgctgcgtatgagttgctgaaagaacagctcgaagatgtattggatacattgactgaacgtgaagagaacgtgcttcgtctacgttttggtctggacgatggacggacgagaacgctggaggaagtcggcaaggtatttggtgttacgcgtgagcgtattcgtcagatcgaagccaaggctcttcgtaagttgcgtcacccgagtcgtagtaaacgactcaaggatttcctcgaataatcgaactatgggagactttccgcaagacgctttagcggcggcggggtctcctttatttttaatttaaacgtcttgatttcttggttttggaaattcatccttgaaatgttttattggattttattttatcgcttttccttgttcaatgcaaatcaataaattaaatgaatggtgtaggtgcttcatgaaactttcgaatcgattacagcgaatacatgatcaaattcccgatggcagccgcatggctgatatcggttcagaccacgcgttgctaccagtagccgcaatccgcagtgggaaagctgcaagtgcagtagccggggaagtcaatcctggcccttatgatgctgcatgcaaacaagtcagcgatgctggcctgaaagaaaaaatcacggtgcgtcgtggagacggtcttgatgtgatctctgcgggtgaagtggatgtcatcaccattgcaggtatgggtggcgccttgattgcttctattttggacagaggtttatccaaactggaaggagtccagttacttattttgcaaccaaatgtgggagaggacatcctcagacgctggttactggagcatcactgggtggttgtagcagaacagttgctcgaagaagatggcaagatctatgagattataacggcgatgccacaatctgtaagcccgattgccaatgtagaggtgtatcgtgcacgtccgcttcaaggcgggacagaattgacggaagatttgctgctacggatggggccttatttggttgatcgaccgacggatgtatttttttccaaatgggaaagtgagatcgtcaaactgcaaggggttgttaactccatctccaaatccgatcaggattcttcccgggacaaggcggctgaggtagagcgtcttatcgcaaacttgaaggaggttttggcatgtttgccaaaggtcaaactgtaattcaactgatggagcaactcgctcccaaacatctggctgtaccggatgaccgcattggtctccagctcggcagtttgcaaaaagaaatccgtcacgtgttagtagctttggacgtgacggatgaggtggtggacgaagcgattcgtatcggtgccaacctgattatcgctcatcacgcgatcattttccgtccggttaagtcactgagtacagatacacctatgggtaaattgtatgaaaagctgattaagcatgatattgctgtctatatcagtcatacaaacctggatgtggccgagggtgggatgaatgactggatggccgatgcacttggcatcgagagtaaagaatcgctggaagatgtacacacagatcatctgtacaagctggctgtctttgtgcctcgtacccatcatgaacaggttcttcaggccattctggaagccggagcggggagtatcggtcaatacaacaagtgcagctttaacacggaaggtacaggaacatttgtacctggtgaagggactcaaccgtttatcggtacccaagggcagatggaacgtgtggaagaaatgcgtattgagaccatcgtaccccaaagtctgagaagtaaggtcgttcaggcgatgcttaaggctcatccgtatgaggaagtggcctatgacctctatgcaatggatttaaagggccgtacgctcggtctgggacgcttgggaccccttagggatcctaagacattaggtgagctagtggaggtcgtgaagacccaattcaatgtgcctcatgtgcgtgtcgtaggagatctgaacaagcagatcaaaaaagcagcggttcttggcggctctggcagccgttacgcgctgactgcccgcttcaaaggtgcggatgttattgtgaccggagatattgattatcacacggctcatgatgcgttaatggcaggtatgtgtatcatcgacccgggacataattccgagaagattatgaaaccaaaaacagcggattggcttcgttcccgtttggaagaaaaacgatatgatacgcaagttacagcttcagaggtaaatacggaagtattccagtttatctaaaaagatcgttgatgtgcaactcccagtaatattaagcttgtctgggaacctaaatgcctgtatactatgtaatgttgttcggaaagcttgacagacaatcgctggtggcctttgttgccacgagaggaaagtccgggctccacagggcaggatgctggataacgtccagtcagcgcgagttgaaggatagtgccacagaaatggaccgccgatggccggattttccggcacaggcaaggatggaaccgaggtgtaagagaccccgaggaacgctggtgacttcgttcctggtaaaccccatctggagcaagacctaatgggacacagccgcctcttcggaggaggcaaccttagcccgaggtgtgtctaggttggtcgcttgagctgtgcagcaatgtatggcctagatagatgattgtcgcttctggtgggagggtagttcccgtatgaaccacgaagagcacagaacccggcttacggtaagctttcctaactgcaacaacactattgcaacacaatgtagtccacctatcagtcgaggacaactcgtatgaatcatcggatggcctcactgatcagaaggacccatgaacatctaaaaaaacttaactcctgttgataacaggttctataaaaataaggcggcagttccgaaattctcgggcctgccgccttatttttgtttctcatatcaaggtattaatcttcatacgctaatggaatagtcaaacgtttatgacagttcattacagtgtaacaacactgtccgatgttaaggaagcatgccaacgttggatggcgcgatccattctttccacggcttccggaaggagctcagggtccgtatgagtaaagttgatccgcatgcggtttaactctggtatgcctgcatagaaggaatcaccagggacaatgcacactttctcctggataccgtaagtgaacagattgcttgcaagcatgccttcaggcaattgcagccacaagaacataccaccttgtggtgaattccacgagataccttcccatgctttggctgccataagagtagtcagtgttttcatgcgtttttcataatcctctgaaatatggcggatatgcgcatccagatcgaaagattcaagcagtgcatgaagcgctctttggtcaatgctgctggagtgcaagtcggcaccttgtttggctcgtgctgccattttgacaatatcgggagcagccagtatccagcccgtacgaaggccaggtgctaccgttttggagaatgtactggtgtagataacgttggaagggccgtcataggatactgcatccagttctgcgagagcagggacatccaattgctccggattaaaccgaatttcaccatagggatcatcttccagaatgagtacaccatacttgcggcacagatccacagcctgctgtcttctttctcgcgaccatacttttcccgtaggattggagaacgtgggattaatgtagacaagttttggacgatgcaactggagctgttcctccagagattcaggcaacatgccgtgatcatcacaggctacgccgtgagattcagcctgataggaatgaatgacttgcagagcagcgaggtaggttggtgattcaaccaatacgcggtcgcccgggtcgagaaggatgcggcaaaccaagtcaatggattgctgtgaacccgtagtgagaagcatgtgatcgggtgaagcgggaatgcccttggattcaagacgttcggcgattttggcgcgaagaggacggtaaccctcagtctccgcatattgaagagcggctgctccgctcataaatactttttcatatgcaacgcggatggcttccagcgggaatgaagtctgggctggtaatccaccggctagagagatcattccaggtgcctgagcggcctggagcatgtcgcgaacgacagaggacggggtgttttgtgccattttggaccaagggatactcatgttattctcatctcctgttattcactgttatactgatattataaactataatagacggactacactataacagtaaaatgaagatcataacagttgggggagcacatatgcatattgaattaaagcggggaagcagtaccaaattgtacgtgcagattgcgctaacgattgccgatcgcatcagatcaggactcattgaacccggaacccgacttccttctgttcgcaaaatgaccgcggatttgggtgtcagcctggtcactgtatccaaagcgtatgctgaacttgaagcgattcaattgatcacctgctcccaggggaaaggttgttatgtgagaggtacattgaacgtggatcagatggaggatgtggaccgaacgcagcgaaacaatgccaacagtgaatccagtacgtcatggaattggcagatggcactggtggattatttaccgcgagcccagctctggagacattttgatacgtcacctcaagtgcggtatgaacttcatatgtcagcgattcagcctgaactgttgcctacacgagagattatcgacagcgcctaccgactctcctctgatcatacagagcgtatggcagcttacggatcttttcagggggatcgggagcttagacagatctttgccgaacattttgccgagcgtggactacaggctgcacctgaacgcatgttaattacaagtggtgctcagcaggggatcgatcttgtggcacgaacttttgtcggacctggggatgttgtatacatggaggcaccaagctataccggagccattgatgtatttacgagtagaggtgcgaagatcattacggtcccgatggatgacgaaggcatgcgtattgatctgttgacccgattatgtgatacctatccgcccaagctgatctatacgatcccgacctatcacaatccaacaggtatcacgatgagtgcaagaagacgagcacaacttcttaatctcgcgcaaagctaccactgcctcattctggaggacgatccgtttgcagatctttattttagggaacctcccccggcttccattaaatcgatggatgggacaggtcatgtcgtatatattaaaagcttcagcaaggtgttgtctcccggttgccgtatagcctgcgccatcgcagacggaagtgtattgacccggcttgtggccgcgaaatctacggcggatctggggagtccgctgcttacacaaaaggcactgcaatctttcattcagaatcagtacggtgcctatgtatcccgattgagggatgaattgtattctcgcttgtgcgcagcatctgaagtgctggaagagcatgctactatgggcatgcaatggcgcttgccagagggaggactcaatctgtggctccaacttccgagtaacttggatatgcgtgagttgcatcatcagtcacttgctgcaggggtctctttcctccctggttcagcctgttatgtaggggagatggatacaccaagtctgcgtatctgcttcacggtaacaaacgttgagcttttgtgtgagggacttcgtgtactgtgccaagtcattgacagagtaacacctgggcagggtgggacagtggcggacaggctaccgctcatataatttttcggactatggacatacatccaatccactttcgatctgttgcaataggttatagtatcaccagaaagggagttggttttgaaatgaaccattactgtccaccgctttgcccgattgtctgtgacccgatccaggttgttgaggattattacatcccacaaatcgtgcctgtaatccacccgattgaagtgatcaaaaaacatcactgtgttccgattcatcaccacatgtatcctgttgttgtcaaagaagaagacccttgttatgtatccagccataatccgaagaaaaaatccgtgaaaaaatcaagcaaagcccgcacaacttctcgcaaacgctaatcgcagcgggtgccccggggaattggatataaaccaaaaagagcagcgtacgccccggggcgcagctgcttttgtattttttacagattatcctcagtacgcttactgcgtatactttttcatcgtattatccatttgttgtctgacatgttgcggccagaactgcaaaggagcgctgttgcctgatgcggcttgcagtgccttatagacatcaatttgaccatagccgaaatacttgtcgtgacccggatcaccgaggtcaataacactttggcgcatcaaatccatcacctccgtgttagtcaagtccgggttcaacgaacgaatcaaacctgcaagtgcggctacatgagggctggccatggacgttccagacaaggccgcatactgattgtttggataggtactggcgatactggaccctggagccatcacatccacatagtccccgtagttggaataggaagctttgctcatatccgggtccgtagcagatacggcaaatacttccggataagcagcagggtatcctggacgctcggtattatcgttccccgtggctgcaatcaggacgatatcccggtcaaaagcgtatttaatggcatcatgaagaaattgggcatcagcataattgccgagactcatgttgataaccttggctccatgatcggctgcccagatgatgccttcggcaacggcatacgtggtaccagaacctgagttgtcgagtactttaacaggtagtaccttgttataccagctcatgcctgccacgccttcattattgttgacaatagcgccgataatgcctgcgacgtgtgttccatgtcccacatcatccatcggtttgcttcccggctcgaccacattataaccctcaaggagcttgcccttcaggtcaggatgattcatatcaaccccggtatcaactactgctacgatgacatctttgtttcccttggtaatattccaacctctgtttgtctcaatcgcaggcaggttccactgataatcggagaacaaaatgtcattgggtatcgttacatctgtttgttcatttacagtatcattggttaaatacatatagtggggctccatataaagtggattccatttgctttcgaaataactatgcaattgtttgtaactcatgtgttctgaccgaaaaacatacgtgtatcccagcttgcgcgcagattgcgctctcagatcggatttaatgatacgcatatcccgttcaccgggatcttggcgaaaacggatgacgatttcattttcataaaaatgactggcatttgcattatcatgtccggtcttcactgtaatttcgttaagcgtatccgggtgaacagactcaattttgaatttaccctcacgcggataagggatcatgcgcagatttttgcgctgatgttgttcaacagcatttaatacgttctgactgaacaaggcaattacagctcttttgccatctttggagggttgccccataacaaaatatttttcttttcccaaaggaaaagaagaggattcaaaactttgacgtttgtttaccgcttttttggcaaggttgagcgaatgttgaagcttctgttgttccaacttgcttccttgtgtggaggcgtgatcaaagggcttgttaaaagagccattggtattcatgagatgaatggatctgatatgttcatgtgaactttggagatcattcacatatcggctaacctgcgcagcattcattgtggcggttttctccagcatgatactgagatgttgcttggcatccatacgggtcagaagatcggttgctttgacatcctgcactttcagacgctgtttactcgtgtgctcctcatgagcagagtcagacagggcacctggcttaggttcgggacgattggatgttggaagcaggagcgtcagagcgagtgctcctgcaccagctgcaagggcccagttaatccatttcggtctggacatggtggatggaacctccttcgttcattttggacaatcattaacagtgcttcgtcgttgtcactggttatatctatcgttagaaaaagcggatatttttatgcaagcgggttcgagtctaactgcgtataataggcatgtttaacggcagaagcggaaagcatgattaagggataccgctcgtcatctttttatggtaggattatagctgagaattcaaaggtcaggggaaaaccaccgttggccgacctatatgtaaggacttatttaagggggagctacctttatgtcagcagccaatgtacagaaaacatgtgagtcaactagggaaaagttaaaaccggctatcgatcggattgaaaattttttgaatgagaatgctttgcctgaactggatcagaatcagacggaagaatcaacagccttctacaaaggatttctttcagatctccgtcatttgctcgttttttctgaagtttcttacgaaaaacttggcgttgtgctgcgtcgtgccaactttgatgtcgattttgccgaaaaggctctttataatacgtatcaccaatgcgtaaacagctttttctatcccaaaaatgaatgttattccgaagacggaagatacgcttacacaggacaagatgccattcgtttccgtgacaagccaatccgctcagtacgggatgtcattcttgaggtttccaaaacgtacgaagaattgcgcgatgatctggcatattatgaaagtgattacctgactcagcgccgtatgcaaaatcaacggaatcacgcctaattaacgtttaaacctgaatatgaaattggacgaaaccgcccttgtggcggtttttttgtgtttttagtgagaatcagacgaggtgtgatcatgtcatcatctggcattttgacggggaatatcaggtttgtggcggggagacaatagtagtcgaggtgataaaaaatgagccaagacaaaccaattgtcaaatgcagcgtctccaactgcaacttttggggagagaacaacttctgccacgctgatgccatcatgattgacatcgaccaacatgccacccgtcgtctgcatgaggaatttgccggtgagacatttgactccgatcaccatgatcatgcacgcacatcctctgcaacatgctgtcacacgttcaaaccgaagtgagcagtcatccctattcataacggaggtgcttcccaatgaaaaatgacgataataagtttaattttcaggatcgtcctaaaatcaatgttgacggtgaaaaacagcgtatgcgcgtcgattatcccagaaaagcacatcgggaagaatacggggcagaggtcgctcctccgactgtcgtaagaactggaggtaccgaacgggcagagcctgtacctgagaagcatgaggcagaccgggtcatggaatcaacaggcaaggttgcgggttacatgggacttgccttcgggatcgcgtctttgttcatgtggtcaatcgtacttggaccggccgcagccgtactgggttactatgcctatgtgaatggtcgtaagacagcgggagcctggtccattggactgggtgttgtagctacgctgagttattttttcatgattccattcgctcgctaacgtgtaaaatgattcattcaaaagccttctgttctcacccaaatgcggtgaactacagaaggtttttttcgtatatgtgcaggttatgtggagagattcatatatttttttgaaaacaatggaaccttgctgtaaaacgatgtagaataaggtcataatacgcttaattatacgggagtgggtataactcatgcagattgatccaagcggatcgcggcagttgttggaactgcaattgtccaatgtgaataaccaaaccagtggatcacaatccgatgctggttcaacagtggatttcgccaatgtgatggacgggctgttaggtacgggtgccaattcgacaagcaatacagattccaccgctacggtctccaaaagatccagtgatggtttgttgtggctgcaactcggaagcacgtacaatccggatataaatacggcaggatcgtcctctgtctccaataacatcgttgagtctttattatcttcatccaatacaggaatcgtggattccggtgcatctgtacctacggattatgaatctttgattgccgaggcaagtgcgaagtacggtgttcctgaatcattgatcaaggccgtcattgacacagagtccaattttaacccaaatgtggtgtcctctgccggcgccaaagggctcatgcaattaatggatggcaccgctgcagggctgggtgtgagtaattcatttgatcctgcccagaacattgatgcgggtacgaagtatctttcccttcagctccagcgttttggtggagaagtgaagatggcacttgctgcatataatgcaggaccaggtcgtgtttcacgtcttggcgtgtcgagtgatagcgaactgatgagtgtacttaaccgtctgccttccgaaacacagaattatatctccaaggtggagaaggcacagtcgaaatatgtgatctaaactcacatatagacagttgtgaaaacacatgataggcaggatgagatcaaatgtgggagcagaagcgcttgaaacgcctgttcccggttggtctttttgtgttgtatgggtatcgtgttacaatgctcactgtaggttcaagaacgaagagataagggaggtctaacctcatttgaaatattttgattatgctgcaaccacacctccccatcctgatgtgattcgtacgatggccgaaattatggagacacaattcggtaatccgtcctccatccatgggtatggagagcgtgccgatcagttgctgcgtcgtgctcgatctggatgcgctgctgcaatcggcgttaagcctgaagagattgtatttacttccggtgccaccgagagtaacaatcttgcgataaaaggtgcggcattacgttatcagtcacgaggcagacacatcatcactacggctaccgagcatgcctcggtgtacgaaagttttatgcaattgcagcagtggggatggaaagtgacattagttcccgtgaattccgatggagtggtcaacgctcagcaggttgtagacgcgatcaggcccgacacggtgcttgtaagtctgatgcatgtaaacaatgaaacaggagccatccatccgattgcagagattggcaaacagctcaaaaagaaagcaccacgggtgcttttccatgtggatggtgttcaaggctttggaaaaatgaaggcgacacctgccgtttggggtgcagatctatacagtctgtctgctcacaagatacgtggaccgaagggagcaggtctcctgtatgttcgaagtggagtggagcttacgccactattgtcaggaggatcacaggagcaaggcctaagagcaggcacagaaaacgtggccttgctggtaggcatggcaaaggctatgcgaatggcagcagaagatcaggttgattttgcccggcgtacaacggtgctccgtgatcgattaatggaaacgatacgtgccattcctgaatttgaattgaacagtcgcccagagggtgcacctcatattgtacacttctcctatcccgggatgaaggcagaagtggcgctgcacaccttggagcaacttggcgtaaccatatcgacccaatctgcctgttcttcgcgttcggctgaaccgagtcgggctctacttgcgatgggcagagatgcagcttgtgctgttggcggattgcgtattagtcttggagatgaacatacagaagaagatgtagccttgcttgaacaggctttacatcagatggtggtgcagttgcggcccctcgaaaggcggatgtaatggatatgaaatatgatatgctgcttctccgtttcggagagtttatgttaaaagggaaaaatcgtgcccgatttgagaaaacgatcattacacaggtgaaagctttgcttaaaccttatccaggagcgagccttcgcaaagaatatggccgtgtctatgtggatcttggcggtgaatcacatactgaactgattaaggtgctgaagcgggtatttggtgtgatgtcgattagtccggttaaagttactccatccgagcttgatgagattgtgaaaacagcagttgcgtttatggacgaaagggaagacgaattcaaggaaggcaccacattcaaggtaaatgtaaggcgggtatggaaggagttcccgaactcttcccatgaaatgaaccatttggtcggttccccgatccttcggaagttccagcaattaagtgttgatgttcgtcaacctgatattgaactgcgagtggaaattcgggatcagggtacctatattttcaacgaaaccattccggcagtaggtggctttccactgggtacgaatggaaaagcgatggtactgctatcaggtggaatagacagcccggtggcagcctggtcttccatgcgccgtggactggaagtggaatgtgtacatttttacagttacccgttcacaagcgagcgcgccaaagagaaagtcattgatttggcacgtgcccttgctgatcatgcgggaacaatcaagctgcatctggttccatttacggagatccaaacggcatttacccagctgggtcaggataatctgattattacgctgatgcgacgttcaatgctgcgaattgcatccaaacttgccgagcgtgagcgggcactcgcactgatcaccggggatagcctaggccaagtagcgagtcagactcttccgagtatgaatgtcattggtcgtgcgacggatctgccacttttgcgaccactggttatgatggataaacaggagatcattactctgtccaaacagatcggaacgtatgacatatctattttgccatatgaggattgctgtactctctttgtgccaaagtcaccttcaaccaatccaaatcttcgaattgtggataaaatagaatcaacaatgagccatctgtcagaatgggtggatcaggcggtgggacaaactgaaacgatcacactgcacgccggtgaaacttctgtggtaacgaatccgacaggcgacaatggcatgaaggatgactggttctaaactcgataaaaattagcatggctgacataataagggctatgttaactgcaaaaaaggactgtccgatgaaatatcgttcagtcctttgctgtattcagatgaaattgttattttaaattagcctaagaataggaacgttgctgttctccgccagatcccttgtggctggaactgctggagcgtttgcgataaccagcaaagactacacctgcaataaccacaacgatgaagagaatgcgcaatgccggatgttccgtaaagtaaggcaagagtcgctgttcctcggtgatcatattggaagccgtatacccgagaacaatggctccgacatagatgatccaaggaaagtgattaattagcttgataaacagggtactgccccagacgataataggtacactaatcaggagtccaaggatgacaagcacgagatgctgctgcgctgctccagcaactgcaatcacgttatctaatcccatggctgcatccgcgatcacgatggtacgaatagcggtccacaaggaagttcccgcctggacattattgtgttcatctccctgatccgccaataatttataggcaatccagatcagaagtatgcctcccacaagcaagagccacggaactttaagcaaccataaaacaacaactgttgctaaaattcgaatcaaaagtgcgccgccagttccatatagaatcgcctttttctgcacggaagggtgcaaatttcgagctgcgagaccaatgacgatggcattatccccagccagaattagatcaataaagacaacgttcagcaaagccagccagaatgtgggactaaatagctccatgatatatgtcactccttatatacggttcaatcattaagaatagcatggacaactccgacatacaagttaatgtggggggatgaggacatggatacactatggctgttaactgaaattttaatgatcaatctggtattaagtggagataatgcggttgttattgcgcttgccagcaaggatctgccaccaatacaacgcaaaaaagcggtatggtggggagcttttggtgcggtactgctgcgttgtgtgttaacctttgtagcggtattattgctgggaattccctttatccaagcggcaggtgggctgttactactctggattgcaataaagctgctgcttcaaaatgaggatgaagtacatattcgagaagcttctacgacctggaaagccattcaaaccattctgattgccgattttgtaatgagtttggataatgttttggccatagcggctttggcagatggagatttggctctgatcgtcattgggattgcaatcagtatccccatcgtcgtatgggggagcggcttaattgttggtttgttgaagcgatttccgattcttgtattcgtcggatcaggcatcctggccttcacagcaggtgagatggtgatgaaagaccccaagttaggagaatggctgggaggtatggcatcagaggtgcatacgctgctacccgtagccatggcttgtcttgtggttgcgattggaggcgcacataaatttgtgcggaagaacgcatagtttaattttggataaaagcttgaacatatgaccgtctgaaccgtccggtttaggcggttttgtggtgagataatacgcttgtcaatacaacaatcattgggctggtcataagttgtacattttagggtaatacaggtaaaggacgcacgcaaagtgcgacataaagtatagttttttgccgaaacatcggatacactagaagcatgattaaaggtttgattatcaacagtcagcatggaatgtctatcgttcatgaagaaataaagtacatagccatagtataagaggtgattttagatgaggatgagaaatgaaaaagcgattggactatttattgtagctgcgggaattattattctgcttggcaagtttggcgtgtttggatttattggtcgtaatttctggcctttgctgatcctgctgccaggtatcgcccttcatgcgttatattatgcgcgtatttcaccatcgtggtcactcgttcctgccggcatactaacggtgtatggtgttttatttagtataacgaatacctggggcgctggacttatgagcaggctgtggccagcattcttgcttgggatcgccatagggttactcgaatatggaatggctgaacggcgaagaccggaatatgtgttacctgcagctttgatccttggtgcggtgtccatcatattattcggatttaccttgctgcaaacgggaataatctatgtacttgctgtccttttaatcttgggtggagtctggttattacttggacgaggacgtcaagggagaggctggtaacattcccagcggtcttttcgtgcgaaatatcttgatttttacctataataaactataatataagggatatagacatgcgtcgggatatcaccgacgcttattttgtgagtaacctgcgaaattgcgggaagtttaagtagatatgatttgaaattggaaaggatatggatacaaaacatgcattcaagagaacacattcgcaatattgcgattattgcccacgtcgaccacggaaaaacaacactcgttgacaagttgctccagcaatccggtacttaccgagatcacgaaacggtacaggagcgcgtaatggactccaacgatttggagcgtgaacgcggtattacgattttggccaaaaacacggctataacttataaagattacctgattaatattgtggatacaccaggacacgccgacttcggtggtgaagttgaacgtatcatgaaaatggttgacggtgtattgctcgttgttgatgcttatgaaggctgtatgccacaaacgaagtttgtacttcgtaaagcacttgagcataacctgacaccaatcgttgttgtaaacaaaattgaccgtccagcggctcgtccgactgaggttattgatgaagtattggacctgttcattgaactgggtgccaacgatcaacaactcgaattccctgttgtatatgcttccgcattgaacggaacatccagcatggataatgatcctgccaaacaagatgacaacatgatggcgatctacaataccatcgtcagtcatatcccacaccctaccgaaaatgttgaagaaccacttcaattcctcgttactttgatggactacaatgaataccttggccgtattgccattggtcgtgttaaccgcggtgtgatccgtcaaggacaatcggtaacggttattatgcgtgatggtaagagtaaaactgcacgtatcgagaaactgtttggtttccaaggtctcaaacgtattgagacggaagaagcaggagcaggcgacatcgttgccattgcagggatcaaggacatcaacattggtgaaaccattgccgaccctaacaacccggaagctttgccagttctgaaaattgatgagccaacactgcaaatgacgttcctcgtgaacaacagtccattcgcaggtcgtgaaggtaaatgggtaacttcccgtaaacttcgtgagcgtttgttgaaagagttggaaacagatgtttcccttcgtgttgacgaaacggatagccctgatgcatttatcgtttccggacgtggtgagcttcacttgggtatcctgattgaaaatatgcgtcgtgaaggatatgagcttcaagtatccaaaccagaagttatcgtaagagaagttgacggtaagaaaatggaacctgttgagcgcttgttgattgatatccctgaagagagcatgggttccgtaatggagagcctgggcgcacgtaaagcagagatggttaacatggttaacacaggtagcggtcaagttcgtctggagttcctaattccagcacgtggtttgatcggatatagcaccaacttcctgacattgactcgtggttacggtgtaatgaaccatgcatttgacagctacgctccagtagtatccggtcaagtgggtggacgtcaccaaggcgtgttgatctcaactgaaacgggtacatctacgttctatggcatgatgggcgttgaggatcgcggtacactcttcttggagccgggtactgaaatctacgaaggtatgattgttggtgaacatacacgtgacaatgatatcgttgttaacatctgcaaagaaaaacaactgactaacgttcgttcttccggtaaagatgatacggttaaaattaaaactccgattatcttctcgttggaacaagcgcttgaatatctgaatgaagatgaatattgtgagattacaccaaaatctattcgtcttcgtaaaaagatcctgaacaaatccgagcgtgaacgtgcagaaaaacaacgcaaaatggcttctaaagcctaataacaacaaaataaactatataagtttgcatttgatgggcccggcaagtaacgagagggttgtacagctaaagtagtgtagggatcagaatcgattctgaagaagcgaagcgctcgcctttatccccggattttaccattgaaaaatggatcaaaaaaatctggggataacagcgatcagaagaacgagctgagaccgaaacggtcacgatgcacgtactggctctctaagttgctaaagggaattccatcaaccagttaacttatcctagcatgaacacgaaaggagctggctgtgcatgcaagcatggttcgcgtcaaacccgatcgtagcctacatcgtcatctttgtattgattacttacgtatataacaaggtgtttcgggtacgtcagaaattgccacttggtaaggaaatcgttctctatattttgatggcgatgggcacattcatgcttcttatttttcagatcgacaagctgcccatcattcaatgtttgctggtggcggttggtttgatgttgttagtgagagtgcgttattttattgaaggtcgtcaaaagaaaaaagcggaagctgccgctcgaaactcataaatcctgtcttgtacagaccatccgttttccttagggaaagcggttgtcttttatttagacaaaaacagatgtgataaaggtgttgaagatatgaactcaaattcgaacggactgcctccacggagacaggcaccgacgcaatccggtgcttctggatcgaagaatggcaagggcaagcagcctaagaagaaaaagagaatgaatgcttttggcagaatccttttaagtctattggttattgccattgtggtaggcggtggatatgcgtactgggtatacaatcaagtcgtggatacaggcatcgataaaccggtacctcccgggatgtcagccacaaccaaaccgatcacgatgctgttattaggcacagataaccgtcctgaaactggcacatatctctcggatgttgttatggtggcttcgttgaatccgaagaccaagacggcaaccattgtatctttgcctcgagacacgcgtattcaattggatgggtacaaatccaacaagctgaattcctattatccaagattcaaggcacaggaaaaaaccactggcaaaaatgcagaggatcagatgaaagaaatgatgggcaagtatttggatgtagatattaattatacaaccgtcctgaatttccaggcattccgtgatgctgtcaatgccgtaggtggcgtggatgtgactgtggataaaaatatgtgttatagagatacagccgatggtacagatatcaatctggtcgcaggcgaacaacatctcgatggtaaagcagcactagattttgttcgttaccgcaaatccaattgtaatccaaagactgatgaatccaatgactttgatcgtaacaaacgtcaaaaccaagtgctgaactccatgctggatcagatgaaatctcttgggggcattacaaagatcagcaaagtaattggtgcagttgacaagaatatgacgacagatgtggaatcggaacaaatgaaaaactttatctcgacgtattggaacatttccacttcggatgtgcattatactccggttaccggagagtggagaagtccatatgtgtatattaatgagacggaactcgccaatgccaagcaggctttacaagatacactttcaggtaaagtaacggcttcaccttcaggcgaataaccttcattcttttgggattggaagcacgttaatcggtatgctataataacataaaccaagtacaagaattgcataaagaaggttagggggctggttgaatgtccgaagccgtcacacaattaactgaatctcttttacagcaattcaagaatgagacctttgtgcttctgagcactgtggatgtagaatccggaggtccgacttcaacagccatctcctggatttatgcggagaatgcttctacttttcgtgtagcaattgatcatcgttcacgtttagtgaataacatgattactaatccgctcattacggtaactgtctttggagaagagacggtgtacgcagtgaacggacgtgctgcagtacgacaagatccgctgctggacgttccatttaatatgtgctgtttcgacattacaattgaagcggtgaggaatgctctgttttacggcgctcaattgtcctctgtgcctcaatatgtcaaaatatatgatcagcgtgctgctgagaaattagatgagcaggtttttgctgccatgaaaaaagcctagtgagagatcactgggctttttgttgtcttttgtccgatgaatgcagctgctgcatttgttgtttttgattcatgggttcatccggattttgacggactttgacgtcttttgggagttgagggataattcgtcccaccatgtcagcgagttctgaagcaaaaccggagattgggtgcccttgacgaatatgttcaccaatctctttaattcgttctgtgacatctgcatcagcagtaacgatggaatctataccttcggggtctttgcgaagtgcttcggcaacagcgtacttaatggtacccacccgagcacgttccagttcaccatcaacatcgatgccaactacggctgtattaccgagtatgacgcagttcgcatcttcaacaccttccacttgcttggcaagggctttaaggtgattgattcgtttttcattgggcatccggccactctttgcatcatctgcaatgttggtatcatggacttcacctgtattctcattgagacggtccaaacgtgaaggattcatccgatcttcctgtgcattgagcatgtgagatcctttcccttgatcttgctgagttgttacatttcctccgtaacctttcgcatgtgtaccttgattcggcgaagcgctgcgtgtggaactgttgcaacctgtaagtataaagatcagaagcagcgtgcaaacccatattttcataaatgttcatcctttcttggagtttttcagaatggttgacaattattttgccctagtcgaatacatttatgtatgggatcatgattgtccatgccgctgctgaaagatcacactattcatgcctttaacgacgccgctttggaggggattgaatgaaaaagatttttgtattggataccaacgtgcttctgcatgaccccaatgccatatttgcctttgaggaacatgaggtaatcattcccgcggttgtactggaggagatcgactccaaaaaaagaaatgccgatgaaattgggcgtaatgcccgtaatgtatccagactgttagatggattacgagagctaggtcacttgcacagtggggtacctttggctaatggaggtaacctgaaagtagagctgaatcatcggagtttcgtgaaagttcaggaaatgtttggtgaagtgtccaacgataatcgcattttggctgtcgcactgaattatcagattgaggagaatgaaaaggaagtagttgaacgtcaggtcgtgcttgtcagtaaagatgtacttgtgcgtatcaaagcggatgtacttggtctgttcacacaggattacttatcagatcggactgcaggactcagtgagttatatccaggttatacggccctaaaagttcatccgtcagtgattgatgagttttacacatatcgttttttaccaatcaaaccattgcagttgtcttattcgttgtatccgaatgaatttgtcattctcaaggatgagatgggaaccaataaatcggctttgcttaaagtgaacacagagggaacaaagctggagccgcttttcctcagtaatgacaatgtctggggcattagcgcacgtaacgcacaacaacgcatggcactggaattgcttttgaatgatgacatcccgcttgttaccatcaccggtaaagccggaacagggaaaaccttgctggcacttgcagcaggtctgcttaaggtagaggatgatcataagtacaaaaaactgttgatcgctcgccctgtcgttccaatggggaaagatatcggttatttgcctggtgagaaggaagaaaaacttcgtccatggatgcagccgatatatgataatctggagtttttgtttgataccaaaaaagctggagatatcgataaaatcctaatgggacttggcagtattcaggtggaggccttaacgtatattcgtggaagatcgatacctggacagtttatcattattgatgaagcccagaacctgtcgcgccacgaagtgaagaccattgtatcaagggtcggtgaaggcagtaagattattttgatgggagaccccgaacagatagaccatccgtatcttgattctgccagtaatggtctgacgtatatcgtggaacggttcaaacaagagggaatcagcggacacatcatgctcgaaaaaggagaacggtccaagctggcacagcttgcagctgatttattgtaaaatttaggggatttatttcccggaaaatgttgttattgaagccggctcctggagccggctttttgctgaaaaaataagtaagcgttattacacagaactcgatatgctcgtattatgcaaaaatccgaaaaagtgtttttcggcagggtaggacaagagtactacttatttgttacaataattgctgcaggaaaaaactaggtgaacagggagggaagttaatgaagcgtagacatcaggttgttttattcgcggtattgctgctttcgttaacgatcttgtcaccgagttttgactttagaggttcgcagctcaatcaggaacgcgatcaggagaaggatgcttttcctgggtcttcgtcccgtaatgaagatgctcaagctccgctggagattgtagtggccatgtcggatgaagagttccaagcctttcaaaaaatagccaaagaagttgctgcttcccagctggtagagattaatcttcggaatgagaagccggatacatataagcatgttttggatcttgaattttcactaggagagaacggtgatgttgttctgcttgatagtgaggaagtgcaatactatgcccaaaaagggtacctgtatccgttaaacggaaccacattatcgaagtcgctaggagataccgtagttgggttacggggaatgacagagtggaatggttatcagtggggaatgccttttgattttgatccgtacattctggctgcccaaactttatttctgaagagagctggtctggagtcattacctcgcaataaagatcagtgggtcaaacttactcaacaagccgttgcggaaggcatccgtttgattacaatgaacatcaatgatatgtacgggacaaatgcgtggctgaatcatttgggaccgaggatggcaccagatcaagttcaacgaacacaattagattcgcaaacgggggatcttcagcaggggattcagttgatgaatcagattcagccccttattaagcttgagtctaccaattcggagttctctccaactgctgaccagaacggcacaccgatggttgtatcattgttatctcaattattaagtgcggatcaagcgagtaaagttgataaagattctttggagcggatttctttcgaaaccttggaaactgtaaactccagaagccttgtcattactgcgggttcggttgaggctgaggaggccagtagatggattgaaggaatgacgtccgctacgacacagctgaaatggtaccaacaggttaaccggttgcccgcaaagcaacaggaactggatatggagtctgagaaactcattggacgttatgaaatgacaaagggacaatcctggttcccgaccacccaagatgtccctgatgcaacgaccgaaagtcatgctctaataactcgttttcataaaaaagtacaacaattcttaaagggtgaaattacagcgaatcaatacgtagacagtattagaacgacgaattaactttaagtttgtgttcaaaaagtctgaatttcaacttggatgctgatgatgccacaaggcatccttcgtaatcaaaaagcggactttttggacaaccactttaaaatgatatagctagttttacttccagtatgccttcacttgttgaaacatcggttgctttcacaaacgagaggattttctgtggatagaacccaaggtcaaattctttttcaagcattcggcgagtggtgtctggtaattcaagctggttgaatacaagtttgtccacatgaaaacgaatggagttttgcggttcattttctaccgtataatgtccttctatgcttaattgcaactgatcccgctgaccggaagctataatcttatcctgattaaactgaaaggcaaagtcttcaaagattgaattttgggaacgaagaaatgcattaagctcatcctgcccaattctaatcgtatacgttgttccagtcgtggatatacctccgttttgtttttggataaaatcgggcaggttctgcatggcagatgccaatgctttgaaatatcgtttcacctcatagatgccgatattctcccaataaagggttaattcatccatcagtttctgaatcgctgccgcatctccgctggtggctatttgggcatccacttctttttgcaaggcgactacacgttcccgctggttttgaagattagtcttcatttcggttaattctgttgtagtctgacgaatctgagtggaagtctgttgcagattgtgataacggtcctgatacttgtccagcacagcctgatcccgtccgataataatctggtaataatcatacagtacaaacaggtctttgaatgatctggctcccaggaccgtcatgaggaggctgtcgcgttctcctgtgtagtaggacctcactacagctccggcccgatcttgctgaatatgtatctgctcttcctgttcctgcagctggacggataatgtctcgtgttgttgacccagctgcttctgcctttcggtgatgcgttcgatctcgtgatcgatttcaacgatggatagacttttttgtaatatctcacgtgtatcctcaggtgaagactctccataggcataggctaaaggtagctggaggaataaaatgatgcataatataaaggcggaaatgccgtgttgacgtttcaccgatccattctcctttccacttcttaaatgacaaacgtacaggcttgttgtcttccagacaatatatgaaacaaatacgtgaaatatccttagtggttacataacaccatgaacattcatttaatctgaacacaacaaaaaagcaacccgacagatatcggatcactttgatgctgcaggtggattagagcggcaaacccatttcgaatacggtccagtagctgaaccccgtgaatgttacgatcatataaccccagaagagcaatatgtacgttcgctcggtaaatttcaagtatcccaaaatgacaaaaaacgcagtctgcaggaaaaaaagcaaagccatttcgaccagatctcccgcaaaagccatcaggccaattgcaagcgtgaagaacccgagtacccgaaacatgcgtgccacggtaaatcctcctctcctaagtacgttcatagattgtctacacaacattataccgggaaaggaaaaacgtgtaaacaaatttggatatgaaagcgaattctttttttgctcaaagtaagtatagagggatatgttttacgtatgtcacgtatgagcaagcctgaatgtggaaatacattttagtatgaaatcaattctatgaactctatgagaggcataagaatgaatgaagcagcttttatacctaattcacataccgggcttccggtaatgcggacggttattttaggatgttgttaggagggtattatagcatgactgcagtgagacaggatgcttggagtacagaggacgatttgatattggctgaggttactttgcgtcatattcgggaaggcagtacacaattggccgcttttgaagaggtgggcgaaaaaataggcagaacatctgccgcatgcggttttcgctggaacagttgtgtacgtaaaaagtatgattctgccatcagtaacgccaaggcacaacgacaaaaacgaagttatctcagaaagcaaccagctatgctcggaccgcaggttgcagcactgtctacactggacactgaagaacatctgtacaaatcagatgggatctcagacgattcattatcgatggatgcagtaatccgcttcctgcgacaatggaagggaacggtgcaggagagtagtcgtcaactcaagatgctggagaaggagcttcgggagaaagaagatgaattgcttgaactacgtcttgagaatgaccgtctctccaaggaagtgaatgaagtacagacggattaccgtgtggtgaatgacgactacaaagctttgattcagattatggatcgggctcgcagactcgcatttttgtccgaagaagaagaggaacttaagacacgtttcaagatggatgccaacgggaatctggaacgaattgaataacaaattcagacgtttgatttgtgaaagtcaggtatgaacccgccacacctccgttacacaacggcaggtatgacgggtttttagtttggtgtttttgttctattatagataatagaaggagaaactactgaagcggagaggagtgcatcatatgatcattgacatcgtaggagcgggggcacttggtcttttgtatggcgggaaactgctggcgtcaggtaaccaggtcagattttggaccagaacaacagctcaggcagacctcctcagccataatggagtaaccattgtggaacaagacgaggagatacatattctaccggatcaaatacaggcgaaaccaataagtaagctgactgacacatggaagaacacacaaggagaatggttactgctcatggttaagcagacaagcattgatgatttcattgatgagattagtccattacaagatcatgtgctgaatgtcgcttgttttcagaatgggatgggccatcttacaaaacttcaagcagctttgccaaagtcgcttctgtgtagtgcggttacaacagaaggtgcgaagcgaacacaaagtcaggtgactcgtgcaggtacaggtgaaactaggctggggaggtacaacatacatataggagcttctacctctatagaggagcagagaacatttactctgtcgggatcgttgcagcaggcaggatttgactgtacagtgtcgaatgaaatcgataagctgatatacaggaaactattgattaattcagtcattaacccgctcacggcactatggcgaatccctaatggagaattgatcgtcaaggaagaacgaaagaggctaatgcgccagttatatgatgaagtattgttaatctactctgcaagtggaatatgtttggatcaggatatgtgggatcaactgatatcggtttgtcgttctactgccacgaatacttcctccatgcttgcagatgttctcgctggacgtggtacagaagtgaggtcaattaacggtcatattgtaaagatggcacagaagttggacctttttgcacctacacatgaaatactgcttcatctgattgaaggaatgcaaccggaaggagtgaattaatgggactttttattgtgttgagcatattgcccttttttccgttctttcttgtctattggggcatgtacgtatggaaaaaagacaaacgtaaagcattgcgaatggcaatggatgtaaccactttttttcttgtattttcagtttcagcgttattcaacttaacatttgattcgaattttggtttttatctgacattaatactcatactagtagcacttggattcatcgggggtgcgcaaaatcgactaaaagggaaggtcgataggggtagaatgttccgggccgtatggcgcatgtctttcgttatcatgagtttcgggtatattttgtttactttatttggattatttagatacttcatgcaactgatgtaaggttacataacgcaaaagaggcaaaaaatgtgtcgattttgtcgaaaactgaaaaaaacattactttctgaaaaagtaatgtagatttttttgaccggtggttgtataatctataaacatataaaccatatcaatttagggggaacgtgttagatgaaaaggaaaagtctattagtccttttgacgctgattttggcgttcggtaccgtacttgcagcgtgcggatcgaaaaacgaaggcacaggtaacaccgatactggttctgcaaacgaaggaaatggtcttgcaaaagatcaaattctgaaaatcaacctgtcagctgaacctcctacgttggacccggctcaagcaaaagacagccaaaccaacacagttctgaaattcttgtacgaaggtcttgtacgcattgatgctgatggtaaagaacaagcaggcgtagctaaagactggaaaatttccgaagatggtttgaaatatgttttcaacctgaacccggaagctaaatggagcaacggtgatgcaatcactgccgaagactttgttcgttcttgggaacgtgctttgaaaccggaaacagcttctccatatgcataccaattgtactacattaaaggtgctgaaggttacaacctcagcaaagatgaaacatacaaaggtactaaagtcacagatttctcacaagtaggcgttaaagctactgatgagcacacattggaagtaacgttggaaaacccaacaccttacttcttgggtctgacagcattctacacgtactacccagtacatgcatctgctgacaccaatgacaaattcttcacagactacaaaaacatgatcgttaacggaccatttgtaatggatcaatactctaaaggtcaaaaaattgttgtgaagaaaaacgatggttaccatgcagctgccgatattaaattggctcaaatcgatatgtctctgacaaacagcagtgcttccgaactgcaagcttacaaatcaggacaattggactacactggtgcacctaacggtgaaattccatccgaccaaattccttctgtaaaagcggaattgccggacgagttcaaagctactggtattgcaagtacgtactactatcagttcaacgtaaacgaagcaccatttaacaacgtaaaaatccgtaaagcatttgcaatggcaattcagcgtcagctgattgttgacaaagttacacaaggtggacaaattccagcattcggctttgtacctccaggtatccgtggtgaaaacggcgaattccgtgatgagcacaaagacgattacttcacagaaaatgttgaagaagctaaagcattgcttgctgaaggtatgaaagaagaaggttacacaacattgccagctgttacgttgatctacaacactagtgatggtcacgcgaaaatcgctttggcggttgctgacatgtggaaacaaaatcttggtgttgatgtgaaaacagaaaaccaagagtggggcgtattccttgagaaccgtcaaaaccaaaacttccaagtagctcgtgcaggttggtctgctgactacaacgatccatacaacttcttggaaatgtggactactggaaacacaaacaatgattccaaattcagcaacgaacagtatgacaaagatgttaaagaaactgtaaaatctgctgatccagctgcacgtatggctgcatttgctgacgctgagaaaatcctgattcaagatgaaatgggcgttatgccaatctattattacactaacgtatctttgactaagccttacctgaaaggtgtacaacttgatttcagtggagctattgactacactcgtgcatatctggaagagaaataagttgttctgaagtctaatatgaatacttcgggatatatatgtggaattccatatatatcccgattttttgtatgtgcaccgattttccttataattcttgaaatttccgataaatggattggactttatttctgtctaattctacaatcgatttgtatacaaaatattgtttgtggaggtgtgcaagggttggttaagtatgtgttgaaaaaactattatttatgctgctatcgcttttcatactcgcatctgcaaccttcttcctgatgaaggctattccgggtgacccttttacatctgagaaaaaagtatcgcctgaaattcgggtcttgctggaacagaagtatggattggacaaaccgatgtatgaacaatacctgaagtatatgggtggaatcattaagggagatttcggagtctcaatgaaatatctcaatcgagatgtagccggaatgatcggcgaaacattcaccgcttcgctgaagcttggagtgtttgcaattgttatctccattatcgtgggtgttctgctgggccttattgctgcagtttaccatcgtaaactcattgatgatatcacgatgatcctggctgtcatagggatagctgttccgagcttcttgcttgcgtcactattgcagtatctctttgctactaaattaggctggtttaacgttatgggctttgatggtccattggattacgttcttccggttgcagcgctatctgcatctccgattgcttttatcgctcgtttgacgcgttcgagcatgcttgaagttttacatgcagattatatcaaaacagctaaagccaaaggtttgaaatggcctgcaattatgtttaaacacgttgtaagaaacggtattctaccagtagtaacttatgttggtccaatgacagcgaatatcatcacaggttccgttgtaattgaacagatctttaacatcgggggaattggtaaagtattcgtagagagtatcacaaaccgtgattacactatgatcatggggatcacgattttctatggtatcctcctgatgttggctcgtttctttacggatatcgcttacgtgctgattgatcctagaattaagctggaaagccggaagggggcataacgttgtctggcacgaataataaaaagaatgaaacggcgaacacgaacctgactagtcaggcagcggttaaaccgcaagaaagtgtatccctttttaaagatgccatgtacagacttgcaaccaataaggctgcaatgatcagtctgagcgtgttggttcttgtcgtgattttctctttgattggtccaacttctttgtttacaagttataattattattccaatgatttgttgaatgccaatgcagcaccgagtgcggagcactggttcggtacggacgagcttggtcgcgacgtgtgggtaagaacttgggtaggagcacgtgtatcccttactgtaggtttggccgcagccttgattgaccttgttatcggggttatttatggagcgatcatgggtttctatggtggacgtgtagatggaattatgaacaagttttccgaaatcctctactccttgccgtacatgcttgttgtaattttgttgctggttgtactggaaccaagtctgacaacgattatcattgccctcaccatcacaggctggatcagcatgtcgtggattgtgcgtggtgaaattatgcaactcaaaaacagagactttattcttgctgcaaggtccatgggagcaagcacaggacgtcaattgttccgtcatttgttgcccaatgcaataggaccgattcttgtaacattgacgttgtccattccaaatgcaatctttgctgaagcgttcctcagcttccttggattgggtgtatcagcaccaagatcttcacttggttctatgatcaatgatgcacttacaggctggacgctattcccgtggcggatgtggttcccagcaggtctgatggttcttacaatgcttgcatttaacttgctcggagacggtctgcgtgacgcactcgatccgaaattacgtaaatagaaacaggaggtgggattatggagccgattttaactgtcaaagacctgagtgtgtcgttctcaacacgttctggtgaatttgatgccgttaaacatgtgagttttgaacttggcaaaggagagacgctggggatcgtaggtgaatcgggtagtggtaagagtgttaccgcccaaaccatcatgaaattgattccctccccgccttcgaaggtcaaaagcggagaaattacttttcacgggcaagacctgctgaataagacagacaaacaaatggaagcgattcgtggtaaagatatcggtatgatcttccaagatccaatgacttcattgaatcctaccattaaaattggtaaacaaattactgaagtattgcgcaagcatcagaacatgtccaaacaagcggcgaataaagcggctttggagatgctggaacttgtaggtattaaaaatgcggctattcgcatgaatcattatcctcaccaattctctggtggtatgcgtcagcgtgccatgattgcgatcgcgcttgcatgtcgtccatcccttctgattgcggatgagccgacaactgcacttgacgttacaattcaggctcaaattctggatgtcatgaaagacatgcagcaaaagctgggaacatcgatcatgctgattacgcatgaccttggtgtcgtagcgggtatgtgtgaccgtgttgttgttatgaaggaaggcgaagttgttgaaacaggaacaactgcagaaatctttagtaaccctcaacatccatacaccattaaattgctgaatgccttgccacgtctggacgagcccaaaaaggaaaaaccagctccggctggtattatcaaaggcagcaataagcctctggtacaagtgaaaaacttgaaacagtactttaatttgggtaaaggtaacattctcaaagcggtcaatgacgtaagctttgatatctttgaaggtgaaacacttggcgttgtaggcgagtctggctgtggtaaatccacaacaggtcgtaccattctgcgtctttatgagccaactggcggaaatgttaacttcaacggaacggatatctacaagttgtccccgcgcaaaatgaaagaaatgcgtaaagatatgcagatgatcttccaagatccatatgcatctcttaacccgcgtttcaatgttatggatattatcggggagtcactcgatattcatggtctggcttccagctctaaagagcgcaagagacgagtggaggaactgcttgatctggtaggtttgaatccaagtcatgcacttcgttatccacatgaattctccggtggtcaaagacaacggatcgggattgcgcgtgcgcttgctgtagaccctaaattcatcatctgtgatgagccattgtctgcactggatgtatccattcaggcgcaggtcgttaaattgcttgaagaacttcagcaacgtctcggcttgacatacctgtttattgcgcatgacttgtcaatggttaaacatatcagtgaccgtgtagctgtaatgtacatgggtaaagtggttgagctcgcagaaagtgaagaattatatgcgaaccctgtccacccttacaccaaaacattgctttccgcgatccctgtacctgatccggaagtggaagcgaacaaacgtcgcatcttgctgccagaagagcatatgagcccgattcagaacggatctggcggtcctgcaaatgatccgtacaacctggaaaattctcaattgattgaggtttccaaaggtcactgggttgcagaaccttacgtataataggaatattaaagcgatatgctattattgatgtattaaatgccgccgactcgttcggcggtttttttcgtattttaattactttcttttgacgaagcggccctgaattcggtacaatcaagaaaggctctttgaagcagaataggaggcagacctcatgaacggtattaccgaggcactccgcagcggatcaagacttgcagaagattatatctgttcaagagatgctgcgcgtggcctttacgagtatgacattcgctgggaatcaggacttcaggcgcgtgccgagtggctggaccaatcggaaaacacacgtattgatcgtcgtgatctggcagagtatttacgtatatataataagcgggtgaacgaccatggagaggttcatgcgtccatcacacgtcttgcagaacaagatgcactagtggttacaggaggacagcagagcggtctgctcaccggaccactgttcgtcatatacaaagccgccagcgtagtggcagctgcgcgtgaagcggaagaaagacttcaacgcccggtagtcccagtattttggattgccggtgaagaccatgactgggatgaggttaaccacacatatctacctgatcgtcagggagacatgaacaaggttaagttacaaggacgattcgcaggaagggattctgtgagtaatgttcatgtggatacgcagcagtggatgaatgtactcgaacaggtggaacatcttttacctgatacgatacataaaccaggactgatgaaatgcatcacagagatccatcaatccagttcaaatctgagtgatgcatttgcccgcatgatatctgctttgtttgccagcagtggacttgttctaatggatgcatcggatccagatttacgcaggttggaacagcccgtgtttgagcggttgatacgaaaaaatgaagtgctgcgcagcgcatacactcaaggtgcttcgctggtacaacaagctggttatgctatgcctgccgaagtggcggaggatggagccaatctgttctacattcatgaaggtacgcgtctactcttgttgttgaaggacggtttatatagtgatcgcaaaggtttggtttctttctcagaggaacgtttgcttcaggaactgggagaacatccggagcgcttcagtaacaacgtattgacacgaccattaatgcaagattccgtgttgcctgtagccgctgttattttggggcaaggtgaaattgcatattggggtttgactcgggaagcattccgtcagttcggcctgcaaatgcccattttgttgccgcggttgtctttcaccattatggaagatattcatcacaaacatatgaaacaatatgggctttcttttcaggatgttcaatatcatatggaagaaaagaaggagcagtggctcgcacagcaggagacgttccaggtagatgaacagtttgacaaggttcaggaggcgtttcttgatctgtatggaccgttgctagatgagatcgcggagattcatccggggctggaacgaattggcgataccaatttgagtaaaatcaacgagcaaatgcagtatctgaaacagcagactcacaaagctatcgaagataaacacaatgtgagtctaaggcactggaacggcattcagaactccttattcccaacgggcaaaccacaggaacgagtacataatgcactcttttacctgaatcgttatggcaccgagtggatcgatgaactgattaaagcctcaagtgaattccttggagagcataaggttattgcactgtagagtcctttataatagaagaaaaacataaacgaggaggacgtgaaatgactacacctgcattgcaaaacagtattgttaaagatatgggactcgcttcagagggtcacctgaaaattgattgggtagaagcgcatatgccggtactaaaccgcattcgtcgccagttcgaacaggatctgcccttcaaaggtttgaaggttgccatttgtcttcatctggaagcgaaaacagcttacttggcaaaagtgatccaagcgggtggtgcagaagtaaccattacgcatagcaatccattgtctacacaagatgatgtttgcgcagcattggtggaagacggggttacggtgtatgcgaagtacaatccggagcctgcggaattcaaatcactgcaactgcgtgcgcttgaggtgaagcctgatctcattattgatgatggtggagactttgcaaccattattgcatccgagcgccctgacctcgcagcaacaattcgcggaggagcagaagaaacgacaacgggtattatccgtttgaaagcattggcgaaagaaggccaattgaagtttccaatggttgcggttaatgacgcatactgcaagtatctgtttgacaatcgctacggtactggacaatctgcattcgacgggattattcgtacaactaacttggttatcgctggtaaaaacgtagtggtagcgggttatggctggtgtggtaaaggtgtagcgatgcgcgccaaaggtcttggtgcgaatgtgatcgtaaccgagatcgatccaatcaaagcggtagaagcacacatggatgggttccgggtcatgacgatggtggaagccgccaaattgggcgatttctttatcgcagttacaggcaataaggatgttatcacaggtgagcattacgatgtgatgaaggacggagcgatcctgagtaatgcaggtcactttgatgttgaagtgaataaacctgaattggctaaacgttcagaatcgattcgcacagttcgtcgcaacattgaggaatatcgtttcaaagacggtcgtaaaatgtaccttcttgcagaaggtcgtcttgtgaacctgggtgcagcagatggtcaccctgccgaaattatggatacgacgtttgctctgcaggcgcttggtctgcgttatgtaagtgagaattataaagacttgggtaaaaacgttgttaatgtaccttatgatattgaccagcaggttgccagctataaacttgaaagcctgaatattggcatcgactccttgtcagctgagcaagagaaatacctggatagctggaaattttaagcactatccaataattacaagctgatgaaatggttcaataggtatagaatggtttattgatgatatggctcatgtgcgggtagacatacgattgcccgtttaagggaagcgtctttgatcctgagtgacaggatcaagggcgtttttttatgctgaaaaattaaaaaatcaagtcatgcaagaagggttttgatttttttgtgcgaatctattatgcttaggtggtggaaagtggggcaaagtgggagaaacgggtgaggagtgagtgggccaatgtttatgggggagttccaacatagcattgatgataagggtcgggtgatcattccggctaaattccgcgaatctctgggaccgtctttcgttgtcacacgaggtttggaccagtgtcttttcgtgtaccccatggaggagtggggggtcatggaacaaaagctcaaagcactgccattgatgaaatctgatgcacgtgcgtttacccggttttttttctcgggtgcaaccgaatgtgaactggacaaacagggcagggtaaatctgccgggcaatttaagagagtatgccaagctggacaaggattgtgttgttcttggcgtgtcgaaccgggtggagatttggagcaaaggcatatgggagagttatttcaatcaatccgaagaagcattcaacgacattgccgaaaagctggtcgattttaattttgatttataaagtcaggaggggtgcaggttgtttcaccacataaccgtactcaaagaagaggcaacagagggattaaacatcaagcaggacggtatatacgtggactgcactttaggcggtggcggacatagctccgtgattgcttccaagctcggtccagggggacgtctgatcgcacttgatcaggatgattgggctttggataatgctcgcgagaagctcgcagcttatggagaacgtgtaacattggtgaaaaccaattttcgagatctggaacaggtactcaaggatctggatgtaccaatgaaggatggtgcaccacaggtcgatggtattttgtacgacttgggtgtgtcatctccgcaatttgatgaaggagaacgtggattcagctacaatcacgatgctccgctcgatatgcgaatggaccaggatgcaatgctgacggccaaagagattgtgaatgaatggccagaagaagagattgctcgaattttgtatcgctatggtgaagagaagttttcgagaagaattgcccgtgttatcgtcggaaaacgagcgcagtctaccattgagacgacaggtgaactcgtggaactgattaaggaaggcatcccggcggcagctcgccgtactggtggacatcctgccaaacgcagcttccaggcattacgaattgccgtcaacgatgagttgggtgcctttgaagaaggcttgcatcaggctgttcgttgtctggcaccaggaggacgtgtatctgttattaccttccactcccttgaggatcggatatgtaaacagattttaagcagttatctggaaaaatgtacatgtccacccgactttccgttgtgtgtatgtgggggcaaggggtccctgcgtttaattaacagaaaaccgctgattccaacggaaacggaattggctgaaaattcacgtgcacgttcagccaagctgcgcgtagccgagaaattgtagatcaagagtggaggagagaatcggagtatggcatatacacgtggtaatctcgctgtaaaagaaaaagcgtcccaggaacgtgtgacccagcaacgatacaaagaaaccaccaaagtggtgacccgtcgtacgggtcttccggcacgcgagaagattttgtatctgattaccctggttgcagtgatccttgttggaggagccttaatgtctcgttatgctcatatctatgatctgaacaagcaggcacagtccactatttcggaagtcaaggggtttgagaagacgattgcagacctgcaagtggaaaaagaaacattgaacaaccaagtcatcgcaaacgcaaaacaacttgggtacgttgaagcttccggtaaggatgtcatttttgtacctcgctcaacaagtacgaaatcaacaggtactgaatcgtcctcgaatacagcaagcagtaagtaaagaggtgttccgatgataaaaagaataaagatgcgcacgttgctaatagggggatgtattaccctcttttttcttgtactcgtaacccgaatctttttcattcaagtagtgaatggcggtgtatggcaggaacgggcggccggtttggtagagcgggaacagacgattaaggctgcacgtggaacgattacggatcgtaatggtaacattctggctaccgatgcgcctgcgtatacggtttccgttaatccattattaattaatgaactcggaattcaggatgttgttacgaagaagctctctgcccttcttgggaaaaatgagagtgagatgcgtgctctggtcacagcgaagaaaaaagatggtgagttttttcagcaacgtgaagtacgcagtgaaggttataagataagtcctgaacttgcggcaaaagttaacgagttgcgtgaagaactgcaagaagagtacaaggctcgtaatgcaattgtgatggctcaggagtcgaagcgtttttaccctgaagaaacacttgcttctcacctcttgggatatatgagccgtgatgggaaagctgtcaatggacttgaagtctcatatgatgaagcactgacaggtacagatggatatttgaattatcagaaggatgccaaaggcattaaacttccggattcacaggataactatctaccacctcagaacggtaagaaccttacgctgaccatcgatgatacgatccagttctacattgaggatgcaatgaaagaagccgttgccaagtataatccattgagcatgacggtcattgcagcggacccaaacacgatggagattctggggatggcgaactggccaacctttaaccctaacacgtatggaagtacacctgatcaaaagaattttatcaaccatgctacgcaatccatctatgagccaggtagtacattcaaaatagttacgctagcaggggctgttgaagaaaaactctttgatcccaatgcaagttttgaatccaaacgaatgtatatcggtggtttcccaattagtgataatggtcattcctatggttggatctcgtatctcgaaggtgtcaaacggtcaagtaacatcgcttttgttaacttgggttacaacatgcttggcggcgaacgtctgcgtcattacatagacgaattcggctttggcaaaaagacaggtattgatctgccaaatgaggcagcgtccccgatcaagccactggtttacaaatccgagattgccacggcagcctatgggcatggtcttgtacaggtaacaccaattcaacaggtcgcagccatctctgcgattgccaacggcggcaaattgctggagccacatctggtgaaggagatcaagaacccgaatgatggaacaacggaagtcatcaaacccaaagttgttcgtcaggtgatttccaaggaatcttccaaactggtgagtggttatctggaacaagtggttgcagaccaaacgattggtaccggtcgtaacgcctatattgaaggttaccgtgtagctggtaagacgggtacggcaagaaaggttgttaacggagcatacagcaagtcaaaagacgttgtatcgtttattggattcgcgcccgtgaataatccgaagattgctatacttgttgtcattgaccagccggatggaaccaacattgggggaggaaccgcagctgccccggtgttcaaaaagattgtcagccagactcttcaatacatgggaatacccaaagatactgccaaaactcctgacaaaaagtcaaaagaagtctctgtcgtgcaagccaaggcgcctgacttgagtggcaagacagccaaacaggccagaagccagcttctaagcgcaggtattgcttatgtgacacttggtcaaggtgataatgtaattcggcagtatccggttgctggtgcctctatgaatccaggccaacgaatctatctgctaacggaagaaagcagcaagatgaagattcccgatctaacaggtgaatctctccgtgatgcccttgaagtactttctctcatgaaggtgggggttacggtcaagggtgagggctatgtcgtgaagcaaaccgagcaggtcgcaggtgagcagagaactgtgcagttgaacttgcaaactgcgaaagctgcagtgacaggtatagccgatgaggctccaatctcttctgatccgtcgtcagaagctgaagtgacggaacaagaggcttcgggcggagaaggtaaaacagacggaacagacgaaacagataacaataaggctccagccaatgaatccgaatcctctgataatccagcaacaaacggggcttctcttccatagggagctctacagcttgttctaacccccggttgtcctgaatattcatgaatggaacgaatgtcatgattttgggacgagtggggggatcttttcgtgaagggatcaagcgtaaatctgcggcgcaggctgctatggagtttaatgattttagttttgttattttcggccctgatgatcaggcttgcttatgtacagctcggggaaggccctgaattgtcagcaaaagcagaagaatcctggcggcgtaatataccttactcagccaagcgaggggagatcctggatcgaaatggaacctctctggcttataatgtgacaacaccgactattatggccattccggctcaggttaaagaagctgaaacgacggctaaagcgctggccccattgcttgggatgacggaagaaaaagtgctcgcaaccatcaagaaacgagaactcattgtacgactacaacccggcggccgcaaaattacgatggagaaagctcagcgcatccgtgatttgaagcttccgggtatcgttgttgctgaagacaataaacgtttttatccttatgatgatttggctgcccatattcttggttttacgggcattgataatcagggcttaacgggtgtcgagaagaaatatgatgataagctgaatggtttgaatggcagtgtgtcctacttgtccgatgcggccggaaggctaatgccgggctcatccgagaagtatgtggaaccgaaggacggccttaacctcaagctgaccattgataaatccattcagtccatcatggagagagaactggatcaggccatggtgaagttccaggcgaactcagcattggccatagcgatgaatccgaaaacgggtgaaattttggggatgtccagcagaccgggatacgaacctgccgattatcagcaatatcccgcggagatatacaatcgcaatttaccgatctggatgacctacgagccgggttccacatttaagatcattactttggcagcagcgcttgaagagaaaaaagtcaatctgcaacaggatcaattttttgatcccggatatgttgaggtgggtggagcccgtctgcgctgctggaaaaagggcggccacggaagtcagaccttcttacaagttgtggagaactcatgtaacccgggctttgtggctttggggcagaggctgggcaaagaatcgctcttctcctatattaaagactttggtttcggtaccaagacagggatcgacctcagcggagaagccagtggaattctgttcaaactgtccagagtgggacctgtcgagcttgcaacgacggcttttggtcaaggtgtatccgtaacgcccattcagcaagtagctgctgtgtcagcggccatcaatgggggtaaactttacaagccttatgttacgaaagcgtgggtccatccggtcaccggagaagtcatggaagaagccaagccggaactggttcgtcaggtgatctcggagaatacatccaaacaagtacgtgaagcactcgagagtgttgtcgcaaaaggtaccgggcgtccggcattcattgatggataccgggtcggtggcaaaacaggtacagcccagaaggttatcaacggacgttattcctcgaccgagcatatcgtatcctttatcggatttgcaccggcagatgatccacagattgtggtctataccgcagttgataatcccaaaggaattcagttcggaggtgtggttgccgccccgattgtgcagaacatccttgaagatgctttgcattatatgaatgtccctgttcggaaggatcaggtcgccaaagaatacaagtatggtgaaaccaaaatcgtgacagtcccagacctgacaggagctactgttgaagatctgtacgaagacctgaacatgaattttatgctggcgaagtctggcagtggtaaatacgtgattaatcaggcacccaaacctggggcgagggtagatcagggatcaaccatccgcatttatatggggaatgtactgaacgatgcacatgatcacacaaaggatgaataacggggcttaggggtagtttgaggcttctagcgcaacaaaattcattcaagtgcgtttcattattgggttgtattgacgatattaataaatacagacatatgttaaaacagaagtataattggaaaagtgaggttattcatgtgcttttaaaacaatttgcatcgatgctgaccaccgcccgcctcgtgggcgaatcaaatacagaatgccaaaaccttcagacagattcccggcaggtaaaaccgggtgatctgtttatctgtcttccgggacatacagtagatggtcatgattatgcagaaaaagctgtaaatgccggtgcagttgcattggtggttgaacggcagctggatctgcctataccacaattgctggtgaaggacagccgatttgcgatggctgttctggcagatttcttttttgactcgccaagccagaagatgaatatgattggtgtaacgggaacgaacgggaaaacaacgactacctatttgattgaaaaaatcatgagtgattacggacgcaagacgggattgatcggtactattcaaatgaggtatgacggtcgcacctacccgatgtcaggaacaacaccagaggcgcttgatctgcagcgtagtctgcatgatatggttcagaagggtacggactgctgtgttatggaagtttcttctcacgcattggaacaaggacgagtaaagggaacaaatttccgtactgcggtattcactaacctgacgcaggatcatctggactaccaccattccatggaggaatatcgcggggccaaaggattgttcttcgcacgactgggtaacggctatacggaagatgcttcacagcgtaaattcgctgttatcaatgcagatgatccggctgcggcttatttcatctctgtgactgcggctgaagtgattacatatggcatgggtgaaaaggcggatgtacgcgcatcccaaatctcaatcacgtctcagggaacttctttccacgtggatacatttgcaggcagcacggatattcgcttgcgcatggtaggcaaattcaatgtgtacaatgcaatggcagccatctctgcagcgctggtggaaggtattccgctggaagagatcaagcgcagtctggagacggttccgggcgtggatggacgtgttgaaggagtggacgaaggacagccatttgctgttattgtcgattatgcccatacaccggatggactggagaatgtgctgcggacggtgaaagaatttgccgaaggacgtgtaatctgcgtgtttggctgtggtggtgacagggaccgtacgaaacgtcctctcatggggaaaattgctgcgaattatagtgattttgtactggttacttccgataatccacggacagaagatccggatctgattctcaaagacattgaacagggcctgattgaagaatccgttcctgctgaacgttatacgatgattgtggatcgacgccaggcgattcatgaagctattgaaatggcaagcccagccgatgtagtattgattgcgggcaagggtcacgagacctatcagattatcggcacaaccaaaaccgattttgatgaccgaatcatagccaaagaagcgataaggggcaaatccaattgataaaaagaacattggcacaattggccgagatgtgtggaggaacattaagtgacgttgctgctcatggcaatgtaatggtcgaaggggtgtttagcgattcgcgtaaacctctggaaggcagtttgtttatcccgctagtgggtgaaaggtttgacggacacgaatttgtgcaagcctgtctagagaagggtgctgcaggggcgatctggcaaaaggatcatggtattccgccacaaggagctgtcattgttgttgacgacacacttgtcgcgctgcaagcactcgcatctgcttatctaacggagaataaagcggctgtagtcggcattacaggcagcaacggcaagacaacaacaaaggacatcgtggatgccatactctcgacgacgttcaaagtgcataagacgcaaggcaacttcaataatcacattggtttaccactgactgtactaagcatggacccggataccgagattatcattttggagatgggtatgagtggtcgcggggaaattaacgatctgtcggttattgcgcagcctgatgtagcggtcattaccaatattggtgaatcacatctgcttcagctggggtccagactggagatagccagagccaaagccgagattgccgcgggattgaagcctggcgggttactgatctacaacggagacgagcctttaattgcacaagtccttgaagaacccgcaacgaaacaacccgatggattgcagcggtttacatttggtctgcaaaccgataatgatgactatcctaccggacttatgaatgcgcagaacggggtagttttcactaccaaacagtctggagaacatgcttttacgctacctctgctaggaacgcataatgtcgttaactgtctggctgctttggcagtagcccgtcattttaaagtgacgacggagcagattgccgcgggattgtctcgcttgaaactgacaggcatgcgtattgaggttacgcaaggcgttagtggtctaaccctgctgaatgatgcatacaatgcaagtccaacctccatgaaggccgcaatcgatgtactagaaggtctgaaaggataccgcatgaaagtggctgtgcttggtgatatgcttgaactcggtccccaagagcaggatctgcattacggaatcggagagtatatcacatcggccaaaatggacatggtgctggtatatggtccgctatcagccaagattgctgaaggagcaagcaagcatatgcctacagaggctgtgcatgcttttatagataaagaagaaatgacccgttatctactggagaaactacatcccagagacgttgttttgttcaaagcctcaagaggcatgaagctggaggacgtggtcgaagcactacaaatagcaccattacagaatcgagtagactagaggggtgaacccatggattttcaggtattactgttaacaatcggcgtttcatttattctggcggtgattgccgcaccgctcctgattccgctgttacgccggatgaaattcggacagcaagttagggaagatgggcctcagagccatttgaaaaaaagcggaacacctacaatgggtggagtcgtcattttagttgcgttcacattggcctttttgaaattttcggcagtcaagaatacagacttttatgtcttgctcgtggctacgctgggattcgggctcattggcttcctggatgattacatcaaaattgtattcaaacgttcgctgggactgacggccagacaaaaaatgctgggccaattgttcttcagtgcagtgatgtgtttcttgctgatccagaatggacacagcacagccatctctattccgggaacgtcattctcgtttgactggaccggatggttctattatccttttgtcgtattcatgatgcttgccattaccaatgcggttaactttaccgacggtctggatggtttgctgtcaggggtaagtgcgattgcctttggcgcgtttgccattgtggcaatgcaagccacgtcgatgccggcagcagtgtgtgcagcagcgatgatcggagccgtacttggttttctggtatacaatgcacatccggccaaagtgtttatgggagacaccggttctctggggattggcggtgcgattggtgcggtagccattgtaaccaaaacagagcttctatttgtcatcattggcggtatttttgttatcgagatcctgtctgtcatcattcaagtggtatctttcaagactcgtggcaagcgtgtattcaaaatgagccccattcaccatcactttgaattaagtggttggtcagaatggcgagttgttattaccttttgggcggtaggcgcaattttggccgctcttggactttatctcaacaaggggttgtagatcatgaaccatcctgaatcatatcgcggacaacaagtagtcgtgctcggattggccaaaagcggcgtacaggtcgccaaagtgctggatcgcgccggagcgaaggttacagtaaatgataaaaaagagagagatcaatgtcccgaagcttccgaattggaggctttgggaatttctgttgtatgcggagggcatccggatgatctgattcacagtggtgtgaagctggttgtcaaaaacccgggtatcccataccatgcagctcctgtgcagcaagctttagcattgggcattgaagtggtgaccgaagtagaggttgcttatcatctatgtgcagcacccatgatcgggattacgggttcgaacggcaaaacaacaacaaccacttgggtgggggaaatgttggaacatgccggcctcaacccgatcgttgccggtaatatcggaacacctctctgtgaagcggcagagcaagcttctccagataactggatggttgttgaacttagcagtttccagctcaaaggaacggttgatttccgtccccggattgccagcttgcttaacgttgcagagacgcatctggactatcatggggatctggatgattatgtggcttccaaagcgaaactgttcgcgaatcagcagcctgacgacgtggccattctgaattgggatgatgcggtatgtcgtggtctggttccttacatcaaaggcagattgcttcccttctcaatgattgagaagttggatgtaggtgtgtatgcagatcctccttatgtggatggagaagaggatgatgtgaagcgtcagattatctacgcggatgaaaagggaaatcaccacaccattattgacatcgagaacattggcatcgctggacaattcaatgtggaaaatgcaatggccgctgtggccattgccgtagcggcaggagctgatccagcagtgctggctgctccgcttgcagatttcaaggcggttgaacaccgacttgaatacgttctagagcataatggctctgcgtactacaacaactccaaagcgaccaattcgaaagctacggttatggccctgaattcgttcaaggaaccggtcgtattaattgctggtgggttggatcgcgggtcagacatgatggagttgttacccttgttccaggaacgggtaaaagctgtcgttgcaattggagagacacggacaaaaattgccaaggtcgcggaacttgccggattaaagcaaattaaggtcgtcgataatgaggaggacgctgcccggacgttaaccgttgctgtgcaggaagcatcgaagcttgcaagtgccggtgatgtcgttttgttatccccggcatgtgcaagttgggacatgtttgcttcctatgaagagcggggacgcatttttaaagaggcggcgcataacttgtaagtaggggggtggaaaagcccctacttacatgcaaggggtggcctcctgatgaaacagacgcgaccggcaccagatatttggttgctgatttgtattttggcattgcttgccatcggcattattatggtatatagtgcgggctcggtgcttgcctttcatgactatggcgattcattttattttgtaaaaagacaggccctgtttgcggtgcttgggcttgtggccatgttcgtaactgctaatgtagactaccgggtgtggaggaaatatgccaagcctatattgattgcctgttttattatgctcattggggtgctcattcctggaattggtgtggttcgcggtggtgcacgaagttggctgggcattggttcgttcggtattcagccctcagaattcatgaagttgggcatgattctgtttctcgctcactggctgagcaaggaaccgggcaaaatcaaaaccttcacaacggggcttctgccaccgctgggattgatcggtttggcttttgggattattatgctgcaacctgatttggggactggcaccgtgatgatgggcgcagcgatgcttattattttcacagccggagcgcgaatgaaacatctaagcctgcttgctcttggtggcatagcggggtttgcaggtttgattgcagcagcaccctatcggctgcagcgtatcacagcgtttttggacccgtggtccgatccgctgggtgccggatatcagatcattcaatccttatacgcgattggtcctggaggactggcgggattgggactgggtatgagccggcagaagtacagttatgtacctgaaccgcaaacggactttatttttagtattttggccgaagaactcggctttataggtggaatgattgtattattgttgtttctggtgctggtgtggagagggatgcgtgtagccatgaccgttccggatgccttcggcagtctgcttggtgttggtatcgtaggtatggtcgccgtacaagtaattattaacattggtgttgtcattggcatgatgcctgttacgggtattacattgcctctgatcagttacggcggatcatcattgaccctcatgctcacagcactgggcattttagtgaatttatcccgttatgcgaggtgactatgcgatgcgagtcgttctaagcggtggcggtacgggtggacatatctatccggccgttgccatagcaagacaatgcgaggcggagaatccggactcgacatttctatacatcggaggaaccagaggtctggaaagtaaactggttccccaagaaaatattccttttaaatccattgatattacgggctttcggcggaaattgtccatcgacaacctaaaaacggtcatgcgtttcattcaaggtgtacgcaagtccaaaaaaatgctgaaggaattcaaaccggatgttgtgattggtacaggtggatatgtgtgtggacctgtggtatatgcagcaacaaaactgggaattccgagtataattcatgaacagaacgccatccctggtctgacgaacaaatttttgatgcgttatgtggacacggttgccgttagctttgaaggttctgaaaaatcgttttccggcgcaaaaaaggtgatttacaccggtaatccgcgagcgactacggtagcccaggctagccgtgatcgtggttttgccacgttaggtgtaccgatgaacagccgtgttgttcttgtggttggtggcagtcgcggggcaaaagcaatcaatcaggccatggtggacatggctccattgctggaacaactggatgatgtacatgtcgtttacgtgacaggggatacctattttgatgaaacgcgtgaagccattcgcagctcattgggtacgatgccaaaccacctgcatgtcttgccttacgtgcataatatgcctgaggtgcttgcctgcacatccttgattgtaaaccgcgcaggtgcatcattccttgcggagattacatcactgggtattccttcgatcctgattccgtcacctaacgtgactaataatcatcaggaagccaatgcacgcacgcttgagggtggaggcgcatcactcacgatgctggagaaggatcttacaggcaaagtcctgtatgaagccatcgccaagattatgaatgatgaatcgggacgcaaacgaatggctgaagcctcccggaaactggggaaacccgatgcagctgaagtgcttgttcatgaaattcagcgtcttgctgcacgccgataaagtgtgattgtgggcgattgtcacacacaagacggggctgacataagataccgtataaatcgtgaccatcgttccatggcgccagaacacggtctgtaataacagaacataccgtgctcatcggttttgaagcaaaggaggaagcaaacatgcatcagtggatatcgttactatcccagaataatgttggcagagttcttgaaaacgaatcgctagccaaatacaccacatggaagatcggcggtcctgcggatgcactggtcattccccagaataaagagcagatgatgaatctcgttcaattgcttcacacgtatcagattccgtggatgcaactaggacggggctcaaacatgctggtgtcagacaaaggaatacgtggtgttgtggtgaaaccaggcgagggctttgattatgccgaatttcacgaaggcggtgtaaccgccggagcggcgcattcttttgttaaactcagtgtggttgctgccaaaaaggaatggaccggtctggaattcggcagcggtatccctggcactgtcggtggagccgtatacatgaatgcaggcgcgcatggatcggatgtgtcacggatattcaaattcgctgagattgttctggagacaggggaattggtacgttacagcaaggaggacatggattttgcctaccgtcactctgttctgcatgaccggagaggcatcgtgctggaagctacgtttgaactccagcatggagagcgcaacgtcatttcggaaacgatggcggcttacaaagaccgccggcgccgcacacagccactgcagatggcatgtgcaggtagtgtattccgaaatccaccaggtgatcatgcagcccgcctgattgaagcagcagggctgaaaggaatgacccagggaggcgcacaggtatccaccatgcatgccaatttcattgttaatacaggccaagcaacagcagaggacgttatcaccctaatgcagcagatacagagcactatatcatctcaaaacggtattaacctggtaccggaagtcttcgtagtgggtgagcggtaaaccccggaggtgatacattggacaaattggtgattgaaggcgggaaacccctctcaggatccatacgcatccatggagcaaaaaatgccgctttaccgattatggccgcaagtttgttggcagatggagaagttacactgcataacgttccacacttgctggacattgaagtgatgctgtatatcctggaacggcttggatgcacgtgtcggcatgaacagggaacagtgacgattaatacctcgtctatccggtcatatgatgtgccagaagatctaatgaagcagatgcgctcttccatttttttgatgggaccattgctggctaagtttgggcaagtgtcagtgtatcagccaggcggctgtgccattggagaacgcaaaattgatcttcacctccggggcctggaagcgctcggagctttgattgaagagcaggaccaacagattatctgtcatgggcacaatctggtgggtacagatattcatttggatttcccgagtgtgggagcgacggagaatatcatgatggcagccgttatggctaaagggacgacaaccatctgcaacgccgcaagagaacctgaaatccaggacctgcaacactttttgaatgctatgggtgcaagcattattggtgcaggaacggatacaatcacgatcaatggcgttgagaaactgaaaccttgttcctatgagattataccggatcgaatcgttgccggaaccgtgatgattgcagcagcagcaacacgaggcaatgttacgcttacacactgcaatcctgctcatcttacttcacttatacatgtattgaagcgcactggtgttcaaatcacagtctgcaatgatataatgacggtgagctgtatgagccgtcccaaatcagtagaccgtattgtgacttctccgtatccttcgtttccgacagatttgcaatcgcaaatcatggtgctgctcagtttggcagacggattcagtgtgatgaaggaaacggtattcgagggccggttcaaacatgtggatgaactgaatgtgatgggggctgatatttcagtcgatctgaacgcagcatttatccgtggtgttccccgtctgtacggggctacagtagaagcaaccgatcttcgtgcaggtgcagctctggtcattgctggtctggctgctcaaggcaaaacggttgtagagcaagtgcatcatattgaccggggctacgatcagatcgagaagttattccaaagtcttggagcatcggttgagcgacagtcgcccgtttcgaaacagttggattttgccaattaacgtccttggcgtccccttcttgaagggaggggacctgaggctttgtggagcgctacttatgcctaaaagtcaaattccggttctgaagaagaatcggccaaaaggaaacacaagccgcaaaattgtaattattctcttattattatttattgtattgctggctgtattattctttcgttcttccatgagtcggatttcggcaattgaaattacgggtaacgtatatacagcaacttcagaactgctggagaaaagcggactgaaagaaggcgaacaattttttgggacaagtactgccgaggttattgagcgtctcaagaccatcaaggcgatttccaccgttaccgtggacaaaaagtttccggggattatccatatcaaggttcaggaatatgccacggttgcttatgagcttggttctgatggtacgctaaaagcgatattagccagcgggacaagcttgacagttccggcaacaattggtgttgctgtggagaagcctatattgacccaatggaaggctgatgatccactcaaagccaaactgagccagacactggctaaaattccgaatgaattgacgacggatatttcggaaattattccgaatccaacgccttcatttccggatcagattcggatgtataccaaatcgcagtttgaagtgattacaaccgtctctcttttatcggataaagtggagtatctgaatcaggtgattgagaccgaacggcctgggaaaatcaccatgcttgaggcagatacctatgtccctttcatcccggatgacccggaagatgatgctgaaccaggagcaagcccctgatctttgccatgatgaggctggactgaatatgaaagcctaggcaggtcggggtttgaccccgtcagagcaatgaaacttgttctttctgagatgaagaaaaaatgatacacttgaacttatggcacatgagttgcctccttcttttttcttcaatgttttatgtctggcaaccagattttgacacccaaaaacattgtagaaaaaagagggaaagcctgaagtgtgttgaatatgttttaagagtgtttaaattcgaacgtaatttactattggagtcaggaggtgccacagacttgagcaacaatgacatcattgttagtttggacatcggtacatccaaaattcgcgctattattggggaaatgaataatggaacctttaatattataggagttggatctgccgactcggagggaattcgcaaaggtgtaatcgtagatatcgatcagacggtgcagtcgattcgcaacgcagtggatcatgcagaacgtatggtaggtattcaaatatccgaagtgtatgttggaatctcgggaaatcatatcggactgatgagcagtcacggcgtcgtggctgtgtctaacgaggatcgtgaaatcggagaagaagacatggaacgggtgttgaaagcagccgaagtcattgcagttccgccggaacgggaaattattgatgttgtcgccaagcaatatgttgtggatggcttggagggcatacaggacccccgtggtatgattggtgttcgtctggaagttgaagcaacgatcataacgggtgcaaaaaccgcgatacataatcttttgcgctgcgtggaaaaagcgggtctgaaagtaagcgatctggttctcatgtcgcttggagcgggtcaactggctttgtccaaagatgaaaaaacgatgggttcagtgcttgttgatattggagcaggtgcaacaaccatcgccatttttgaagaagacagtcttgttgcaacatcaacgttgcctataggtggggaattcgtaacaaatgatatcgcctatggcttacgcacgttaacggatcaggcggagaaggtgaaactgaaatatggctgtgcctggttggatgatgctgctgcggatgtgatgttcaaagtcacccgaattggcagtaatgtagacaaggagttttcacaggaggatctggcagcaattattgaacctagggttcaagaaatattccagatgatatcccaagaagtgaagcgtcttggttacaacgagcttcctggaggttatatactaacgggaggtacggtctctatgccgggggttctgcaggtcgctcagcatgagcttgctgcttcggtacgagttgcagttccggattatattggtgtgcgtgaccccgggtttacaagcggagttggcatattgcacagtgtaattcgcagtttgcgcattcgtccctcgatcaataacggcggtggaaataacaataacaataataacaacaagaaaccgaccaaccgtccgaagccaaatacggcacaggaatcggagcaaaaacccggtctgttcgagcggctgaagaatatgttcagcgaatttatataacaggttggatccatttcatacattcttgaagccgtctgaatgcgccggtactaaaataaacgctttcgttcgtcgatatatgaaattgattcggttcaaatcaaaaattggacgggccatccatgcacattgagggggagatggaataatatgttggaatttgatttcgagatggagagcttggctcaaattaaagtcatcggtgtaggcggcggcggaagcaatgcagtcaaccgtatgattgaaaatggtgtacaaggtgttgaatttattacggtgaatacggatgctcaggcgttacacctggcgaaatccgagcataaattgcaaatcggtgataaattgactcgtggtcttggtgctggcgccaacccggatgtaggtaaaaaagcagcggaagagtcccgcgatctgatcatgaacacgttgaaaggtgcagacatggtatttgttacagccggtatgggcggtggtacaggtacaggtgcggctccggttattgccgaaatcgctaaagagtgtggtgcacttaccgttggtgtcgtaactcgtccatttacatttgaaggacgcaagcgttccagccatgcagagcaaggtattgaagctctcaaggaaaaagtcgacacactgatcgtgattcctaatgatcgtttgctcgaaatcgtagacaaaaagactcctatgcttgaagcattccgtcaagcggataacgtacttcgtcaagctgtacaaggtatctctgatttgatcgctgtaccgggtctaatcaaccttgactttgctgacgtcaaaacgattatgcacgaacgtggttcagcccttatggggattggtgaatcaactggtgagaatcgtgccgcagaagcagcacggaaagccattatgagtcctttgctggaaacttctattgaaggtgctcgcggcgtaatcatgaatattacgggtggcgttaatctgtccctgtatgaagtgaacgaagcggcagagatcgtaacttctgcttccgacccggaagtgaatatgatctttggtgccatcattgacgaagacctgaaagaggagattaaggttacggttattgcaaccggttttgaagataaacctgctccaccaccaccaggacgtaagccagctccagcaacagcggagacgacggatacgcgttcgccgaacctgcgtcctttcggaaatcagccgagcaatgatcagctggacattccgacatttttacgcaatcgttcacgcaataataacaacgattaatacgcaaatcaatttattggaaacccggtactccttatggagcgaccgggtttttttgtttatttagatatcatagcatacagcaatgaacaaattctgaacaaagggcctgagcaattccgacaaaaaaagttggaaccacacccccatgattagacagactttgaacagggggctccgtatacttgtgaatatgctcatgaatatcaggatatcgggtatcggtatttcgatatgttgcgcgcaggcaggtgaagactttggttgtttatgtggatctaatttttttgacaaacctgtgtattgacggtgcactcatcggaatgaccgcctggatgcgcaagacaaagctggtttggtggcgatggttgctgtcagccattgtgggtgcattatacgtggtcatgatgtttgtaccggagtttgattttatgttcacctttctgatcaagttcgggttctcgctggtcatgcttacgattgcttttggttttaaaggtctgcaggcttttgcgaggacgctcggtaccttctatgtgattaattttgtcgctgccggaggtattctgggtgtgcattacatgcttcagagctccggtgagttgtttaacggcatttggttcacggcttctggcggtatgtcatttgatctgaaaattgctttctggttcacgtttatcgtattttttgctgtcctgtttttattcaaagcggtgcagagctcaaaacggaaaacggatcgcatgacgacctatttgggtaaagttgaggtctgcatcgatgaggtagtcatttcttgtacaggccttctggatacgggcaatcaacttacagatcccttatcgcgcatgccggtcatggtgatggaggtttcgttatggcaagacatgttacccgcttcatggaagggtagactcaaggacgaggcgccggacaaccttattctggagcttgatcaggaaagttttcagtggcaggatcgactgcggctggtgccttatcggggcattaacaaagggactgcgtttatgctggcaatgaagccggacagggtgaaggtgacgatggaggaaacatgttatgagacgacaagggtacttattgggctggatggaggtgttttgtcgtcggatgggaaataccaggccgtgattcatcctgaacttgtgcaagacgctgcttctgcgcagtctacggctctctctgcgggagcaacagaaaagccgctgaatgtggtataggaggaacgtacatgcttgtgaaatggaaactggtggcgcagctgcaatattaccgtctgttatttttgttggggctcaaaagtgaagagatctattatattggggggagtgaggcacttccgccgcctttgacaagggaagaggaagaatttttgttgcaaaaattatcctcgggagactcggccattcgcgcgatgctcattgagcgcaacctgcgtctggtagtgtacattgcacgaaagtttgaaaacacaggaatcaatattgaggatttggtctccattggagctatcggattgattaaggcagttaatacatttgacccggaaaagaaaatcaaactggcaacctatgcttcacgttgtatcgaaaatgaaattttgatgtacctgagacgtaatagtaagatccgaactgaagtttcttttgatgaaccgctcaacattgattgggatggaaatgaactattattatccgatgtattgggtacagaaaacgatacaatctatcggaatattgaagagcaggtagaccggaaacttttgcacaaggcactggaaaaattaacggagcgcgagcgaatgattatggagcttcgttttggcctgacggatggggaagaaaagacacaaaaagatgtagccgatctcctcggaatctcccaatcctacatctctcgactcgaaaaaagaatcattaaaagacttcgcaaggagttcaataaaatggtctgaaatacatcattggtcagaatgggtattactggcaagggtgccaagtacgaataaaaaagcctgccccggagataatgtacattaatgtttctccttgggaggtaaatcacgatgacccgaaacaaagtcgagatttgtggcgtggacaccgcaaaattgcctgtcctcaccaacactgaaatgcgggaattgtttcattcccttcagcaacaccatgatcgctcagcaagagagaaattagtgaatggcaacctgcgtctggtactcagtgtcattcagcgttttaacaatcggggggagtttgtcgatgatctgttccaggttggttgcatcggcctgatgaaagccattgataattttgatttatcccagaatgtcaaattttcaacctacgcggtgccgatgattatcggtgaaatccgtcgatacctgcgtgataataacccaattcgggtatctcgctccttgagggacattgcttataaagcacttcaggtccgtgacagcctgacgaataaaaactcccgggaaccgacgatattcgaaattgcggaagtactgaatgtgccgaaggaagatgttgtttttgcattggacgccattcaggacccggtctcgctcttcgaaccgatttatcatgatggtggagatccgatctatgttatggatcagatcagcgatgacagaaacaaagatgtgtcatggatcgaggaaattgcacttcgtgaagcgatgcatcgtcttggtcagcgggaaaaaatgattctgtcgatgcggtttttcgaagggaaaacccagatggaagtggctgatgaaattggcatttcccaggctcaggtatcacgtctggagaaatcagcgatacagcagatgcaaaaacatgtaaagtcataacacgatgcaaaggcagaaggacgatcaatcggggcagtgtataccgttggtcgtctttttgttttggaccgtttccacattcgatgaaaaacaggacatttttcgcccctgaaacatatattgtatagaagcgtgaagaacgggcagaagaggaataacagggggcgggaatgaatgaaagtaaatacgagcgaagtagcggcacgaggcatgaaaatctcggactttcagacaaaggatgtcattaacattacggatggtaaacgcctcggtcagatcagtgatttggagctggatctgaagcagggacgaattgaagcgattgttgtgccagggtacagccgttttatgggtctttttggcgggggaacggatctggtgattccctggagaaacattgtgaagattggttcagatgtgatactggtgaagatggatgaggtgaaggaaaatacgtatgacgagcgtgatcgcgaagcgcgcctgtatgatgaacagcagcataaccgcacagagcgagtggaacgcattgaacggtcggaacgtaatcagcgtcgaacgatataaatgagacagaatgtggctcatttggtacactggaagtggtgaggtgagataatggaaccctttgtattggataaagaattacttgaacggaccaagaacccaaattcagatttcggtcctgatccgttattattatatgttgagccttggacacagcaatttgaacagctgtcagtcgggtttacgacgaggcatggtggagttggaaaagttccgtatgctacgctcaattgtgcttatcatgtgggggatgaccctgaagttgtacttaacaaccgcaggcttgtaaccgagaagcttggctttgcagcagaagcatggacctgtggagagcaggtgcatggcaaacatgtggctgtaattaccgctgaagatcggagcagaggattacttgatcgtcaatctgcgttgcaggatacggatggcttggtcacgaatgtgcctggtgtgctgttgacttctttctacgcagactgtgttccgctttatttctatgaccctgtgcagcaggcggtaggtcttgctcatgccggctggaaaggtacagtcgcgggtatcgctgtatccatggtggagacgatggaacgggagtatggcagccgtaggcaggacattcgagctgcaatcggtccgtcgattggggattgctgttatgaagtggatgaggcggtcatgcagcatgtacgggtttggtttgatgattccccggttaatgataaatacaaggattctgcttctaaacaagcatatcgagccgtgaataacggtaaaacgatgttaaacttgaaagaatgtaatcgacacattatgatgaaagcaggaataatgccggatcatatcgaatgtacaacatggtgtacaagttgtcatcccgaactatttttctcctatcggaaggaaaatggtgttacagggcggatggcgagctggattgggctggaagagaggtgaccctctgtgtcattggaggagcgtatacaacaggtaaatcagaagatcgaggatgcatgtcggcgcagtaaccgtcatcgtgatgatgtgaatgtgattgcggtcacgaaatatgtctcacttgaaacaacgggatcggtgctggatcatggtcttgagcatattggagaaaatcggtggcaggatgcacaggccaaatgggaagcttttggtcagcagggtacctggcactttatcggtcatttgcagacaaacaaggtgaaagacgtgattggcaagtttcgttacatccattcactggatcgtttgtcattggcgaaggagttggataaaaaagcagcttcacttggcatccaagtggaaacgtttttgcaggtgaatatttcgggtgaagagagcaagtatggattacagcctgaacaggcaagttcttttttgcgtgatattcgttcgttcaacaatctcaaggtcgttggcctaatgactatggcacctcatgaggaagatccggagctgacgcgtcccgtatttcgtggattgcgtgagctgagagatcaattgaatggacaagcccttacagcagaaccattgactgaactgtcgatggggatgtccaatgattttgaagtggccattgaagaaggtgcaacctgggtacggctaggatcgattctcgtaggaaaagaggagggttcacgatgggcgtaatgaataaatttatgaatttcctcggacttcaggaagaggaagagattgtggaacgtgaacgaatggctgcgcaggaggaaaatgaatctgaacatcaggaagctgaaacctccagtctcgataaacgtagaaaccaaagggggaataatgtggtgagcattcattcccagaaaaatgttaaagttgtcctgtatgaaccgcgttcttatgacgaggctcaggaaattgccgaccatctgcgttcgcatcgtaccgttgtggtgaatctgcaacgaattcgccaggaccaagcgctgcgcgttattgattttttgagtggcacggtatatgcattgggtggcggtatttccaaaatcggcggaaacatttttctctgtacgccagatacggttgaaattcagggatcaattacggaaatactggctgacagcgagcaagattataacagaatgaggtgagccacttttgtatcagattgaaagcgtgttgtacacgttataccagatttacttttacatggtcattgtctacatattgatgtcttggcttcccaatgcgcgggaaagcttcatcggtgaatggctgggcaaattagtggaaccatatttaagaccgtttcgccgatttataccgcctttgttcggtgtgctggatatttccccgattgtggcgctgatcgttctgcaacttgcgcttaatgggctgatctccatactccggtattttgcatattagaggttgttcaaaaagtccgcttttgattacgaaggatgcctagtggcatcgtcagcatcgaatatggaattcagccgaaatgtccgttgctcacgtagttttttctacgctccgctactccatttctagctttatcccatcttctcggtactgaaaaccggtctttttgaacacggactattagggtagggtgacatagatgagcggtgaaatttacgaacattttagccatgatgagcgggattttgtagataaggcttcggattgggttgagcaggcgggtaagtatcatgacatgaagctaactgactttcttgatccaagacaggtttttatattacagactcttgccaatcgccgtaacgacgttcagattcgtctggatggtggttacgaggctgctgaacgcaagcgtgcgctggttgcacctgattatatgtatctggatgatgaggatatgggtatgcaggtgctcagtattacgtctgatgatcagaaaatctcggagctggagcatggggactatatgggttccctgctcgggcttgggatgaaacgtggaaagatcggggatatccaagtgctggaggacggttgccatacagtggtggcggcggaaaccggcgcttttttatcgcttcaactgaatcaggtgcatcggttacatgtgttcacagagttacttcctttggatcagatgcgatggtcagagagtaaactggagacgatggacattacggtcgcttcgcttcgtttggatggaatctgcgcagatgtgtatcggcttagtcgcagtaaagtgctggctccgatcaaagctggtcgctgccgtgtgaactggaaagttgaggaagatccctccaaatcgctaaaagcgggtgatgtcgtatccattcagggatttggccgtttcaaggttatggaacaggatgggatgaccaaaaaagggcgttgccgagtgaaaatcggcaaatttgcctgagtctgttgcaggaaaatccgctttcttgtcgaaatgtttatcataaaggtgtagaaaatacgcggtgtatccgataaacattaagtcaaagctttacatgaacgttggaggatgcaattctgatcctgcattccgtatacgttgccaaggttaggcatcaacgatacggccccttgggtggtacccatatgctgcaaaccttctctggacgggaaggaactttaacaggaggtggacagcatgccattaacgccgctggacatacacaacaaggaattttcccgacgtttgcgcgggtatgacgaggatgaagtcaatgaattcctggatcaagtcatcaaagattacgaaggcgtcattcgcgagaacaaagagctgagcaatcagttgctgtccgttcaggagaaactggatcatttttctacaattgaagagacgcttagcaaaacgattatcattgcgcaggaagctgctgatgatgtgaagggtaatgcgaagaaagaagcgcagttgatcgtgaaggaagcagagaaaaatgcagaccggatcgtgaacgaatcgttgggcaaatctcgcaaaattgctttggaagtggaagaactgaaaaagcaggcctcgatttatcgtgcccgtttccgcacgcttgttgaagcgcagcttgaactgttgactcaggatggttgggaagtgctggagagccgggagcaggaagtgcgtgaccgtgagcgggagatgaaagaaatttattagtctgtcgcctggttgacttttgtctgcaaagaggctataactatattcataatgaatagtgattccatgacgggttcagtacgttatgatctcatccctcagagagttggtggttggtgcaaaccaatggatgagttatagccgaatatctccccggagaagtgacgctgaagcggtgattatgattgccgtgtgtaagccgaaccgtaagccgtacgttataacggcaccctgcagtagtttagcggggcataagcgctgttgatgacagagcatacctaggtttgcctggatgtggtttgtgatgaacagaattagggtggtaacgcgagtatagcctcgtccctttccagggacggggcttttttgtgtccaaaaaaggcgaacgtccatgaggcccgaaaggacctcaaggagagagccacctgccgggaaagcaaagcacccggcacacgggtttcgctaaggcgaacgcccatgaggcccgaagggacctcagggagagagcccacccgccgggaaagcgaagcgcccggcacacgggtttcgctaaggcgaacgcccatgaggcccgcagggacctcaaggagagagccgctcgccgggaaagcgaagcacccggcacacgggtttcgccaaggcgaacgtccatgaggcccgaagggacctcaaggagagagccgcccgccgggggagcgaagcgcccggcaacacccgcctcgcggtaaggccatgcggcgttcacgcagggaacagccgcataatggccgccatcacgcacattaaccttcgcccataagcgccaccgatccccaacgacaacccatcccgggtgtccagagggcggagcgcctatggggtcccccttggcaagggggatttagggggattgaaacgctttttgtggacggtccacaatccaaccaaagaaagggaagataatgatcatgcaacgagttgacgttaaagagaaggcacgtgccagagaattacgcgtgttagataaatggaaaacggagaatacattcaaaagatccatcgaaaaccgtgagggcaagccaaacttcgtattttatgaagggccgcctacagcaaacggtaaaccgcatatcggtcacgtgctgggacgggtaatcaaggattttgttggacggtataacacgatgaagggttaccgtgtcgttcgtaaagcaggttgggatacacatggtctgcctgtagaactgggtgtacagaagaagcttggcatctcccacaagtgggagatcgaagattatggcgtggagaaattcattaacgaatgtaaagcgagtgtattcgagtacgagcaacaatggcgtgatttgacagaaggtatcggatattggacggatatggataacccatatatcactcttgataacaactacatcgagagtgtatggaatatcctggcgacgatccacgagaaaggcctgttgtatcgtggtcatcgtgtgagcccgtattgtccatcttgccagacaacactgagttcgcatgaagttgcacaagggtacaaagacgtcaaagatctgagtgctactgcgaaattcaaactgaatgacagcggagaatttgtactggcttggacgacaacgccttggacactgccttcacacgttgcacttgccgtgaatccggatatggactactcccgtgttcgtcaaggtgatgaagtgtacatcatggcaaccaatctggttgaaaaagtgatgaaagataccaaaggtgagtatgagatcattggtgcactgaaaggtgccgatttggttggcaaaacgtatgatcctccgttcaactacgtacaggctgagaaagccaacatcatcttgggtgcaggctttgtaacggatgcaagtggtacgggtattgtacacatggctcctgcccatggtgaagatgactaccgtgtatgccgtgagaatgggatcagctttgtgaacatggtggacctggaaggcaaatttgtcgctgaggttactgactttgccggacgttttgtgaaggattgtgatattgatatcgtgcgatatctgtctgagcatgggtgtttgttcagcaaagaaaaatatgagcacagctatccattctgctggcgttgtgatacaccgcttctgtactatgcgatggacagctggtttatccaaacgacagcgatcaaggaccaactgattgccaacaacagtgaagtggattggttcccaggtcatgttcgtgaaggtcgcttcggtaagttccttgaagatcttgtcgattggaacatcagccgtgatcgctattggggaactccactgaacatttgggtgtgcgaggagactggcgaacaatttgctccacacagcattgcagaattgcgtgctcgtgcggtaggtgatgtgcctgagaatcttgaattgcataaaccatatgtggatgacgttaaagtcatgagctcttgtggcaaatatgagatgaaacgtacaccggaagtgatcgatgtctggttcgacagcggctccatgccgtttgcccagcagcactatccatttgaaaataaagaagtattcgaacagcagtatcctgctgatatgatctgtgaagggattgaccagacacgtggctggttctacagcttgttggcggtttctacccttttgacaggcaaagcgccttacaaagcggttatggctacaggacacgttcttgacgagaacggacagaagatgtccaaatccaaaggtaacgttatcgatccttgggaagtaattgaagaatacggtacagatgcattccgctgggctttgttgtctgacagtgcaccgtggaacagcaaacgtttctccaaaggtatcgtaggggaagcaaaatccaaaatggtggatacgctggtcaacacccatgcattcctgacgctttatgctaccattgatggatttgatccacaggagcacccgttccaactgtctgcacacaagctggatcgctggattctgtcgagactgaacagcctgatcctggttgtagaaaaagcgctgttggttaacgactatctgaactcttccaaagcgattgaagcatttgttgatgagttgagtaactggtatatccgtcgttcccgtgaccgcttctggggaagtggcctgacagaagataaactggacgcttaccgtacattgaccgaagtactggtgactaccgcgaagttggttgctccgttcacaccaatgctggcagaagacatctatctgaaccttgcaacaggcgagagtgtgcacatggaagactatccggtagctaatgaagcgctgattgatgcaggactggaacaggatatggagacggctcgccgcgtggttgaacttgcccgtaacgttcgtaacgaaacaggcatcaagacacgtcagccactgtccgaattgatcgtttcactcgataaagggtttgacctggcaagttatgaagagatcatcaaagaagagatcaatgtaaaaggaatccgtacggagcataatgatgcggaattcgttgactttacattgaagctgaacctgaaggttgcaggtaagaaatacggtaaaaacgtagggttcctgcaaaacttcttcaagggaatgtcagccgatgagacgcgtaaagtggtttcggaaggtgtactgaacatcgtttcaccggaaggcgaagagctgcaagtaacgagcgaagaattattggttgataaacaggccaaatcaggttttgcttcggcatcaggttacggtctgacggttgcgctgaataccgaaatcacggtagccttggaacaggaaggttgggtccgtgaagtggttcgtgctgtgcaggatacccggaaacgtctggacctgccgattgagaaaagagtacgtttgacactggatgtggatgcatcccttcaggaagctattcaggcgtttgatgatgtgttgcgtgaaaatgttctcgtaaccgaagtgacatttggctcgaatgagtccatggaacgcgttgaagccggaggcaaatcgatcggtatttacatcgaagcgtaattcggagcatgtcccatccaattaggacagaatagagagtataaacaaacgaggcgcagaggcagggacatattccctgtatctgggctcgtttgttttttaaacaaaaaggcaatgattctatagtgcagtcaatctatattgatcaaaggaactgaccaaaacatgagcgaacatgacaagcaaaccgcatccacttcacaacaaccaacatcagataatctcaattcccatgacaaaattgaagagttacataccctgacgaaccgtctggcgaatgaactggaacgttccaggattgcgcaatacacagaattgctgaacaggccatggaaactgattggattgaacctgttgtctggagccgcacgaggtgtggggattgcgattgggtttacctttttcgcagcaacgattatttacgttttgcagctacttggggcgctcaatcttcccattgttggagattacatcgctgatattgtgcgcattgtccagcgccaacttgatatgaacacatactaagcgatcagcagcgtttaaaggtgaaagatatcaaagtgcatttagtaaatgtcatccgtctccatatccggttctaacagaccctcgccctcacggttctccaggtactggcgatattgccgattgcgcacgatggagacgtcatgaccatagatgtccgtggcaacaaagctttcgtacgcttcaacgcagccttccacttcatcggtggcttcaatcgccataacatcatagctgtcgatatcgcgtccttcagccatggctggtgagttcgatgtgccccagctttcaacaatctgccaagtgtcttcaccatcgaagccattttgatcatcacgctcgtccagactggttcgaccaaatgccggggcgaggaattcttcctctacaggacggttctcagagacaacggtttccggttgatgttttttgcagtatttggtgtagggaacagcttccatgcgttcataagggatgggttgctggcagaccgcacatgtaccgtaatgtccttcttcgatggagtgcagtgcagaatcgattcgttccaattggaattcatcatgttccagcagggaaatatctttctcgcgttcatacacctccgtagctatgtcgccaggatggttatcaattggggataattcacctgtctgtagtttaagggagtctccaagtccataatgctcgttttccgacagtctatgttcaatatcgcgcttatcggacatcagttgggaacgtagaaattgtagttgttcgttagtaaaatgtgacatgattttcccctttctgctttcatgctgaaatccggattttgactctattgtaggatgtgccattgagggcaagattacagaagggaaatgttatcgtttttgccataagcattgcgatgtagcgcgtcgtggacgatttccaaacagctgtgctacaataaacaagtctggcgtaagcctggtatcgtttggaaaagacaagaacggagtgacaaacaaacgtggtgtattatatcctcgcttttatcgtatttttattggatcagggaaccaagtatctgattgcaacccggatggaactcagagaagaaattccggtcatcggcaatttctttgtcatcacatcacatcgtaactcaggagcagcttttggcattctgcaagaccagcgttggttctttatcgtggttacgttgattgttgtcgttgccttgatttggtatttgcaaaaggtaaaagataccccgcacaaattgctgcctgtggcgcttagtttggtgcttggtggagcaattggcaacttccttgaccgggcattgaccggagaagttgtagattttgtacaacttaattttggaagttatacgtttcccatttttaacatcgccgattcggcaatctgcatcggtgtagggttgatcatagtggagacattgcttgaaggacggcgcgaaaaagcagccgcgaagattgaagggaatgaacatcatgagtaatccgaataaggaacagattaacgacgaagaactaatgaatggcaatgaacgtatggaatggaccgttgccgctgaacataaaaaagaacgaattgacaaatatattacggaagccgtggataacgtatctcgctcccaagttcaattgtggatcggagacgggatggttactgtaaatggtgctgttgtcaaagccaatgccaagttatccgaaggtgatctgattgaactacagattcctgaaccggctgccgttgagatcgttgccgaagatattccgctggaagtggtatatgaagacagcgacctgatcgtgattaacaaacagcgtggtcttgtggtgcatccggcaccaggacatacgtcgggtaccctcgttaatgcacttatgcatcactgcaaagacctctcgggtattaatggagagttgcgcccgggtattgtgcaccgtatcgataaggatacatccggcctgatcatggctgccaagaacgatcgtgctcatgcatcactggctgctcagttgaaggaacatacggtgaatagacggtatattgcgcttgttcatggtcatcttaatcatgatcaagggaccattgatgcaccaattggacgagataccaatgaccgcaaaatgtatacggtaacagaacgtaacagtaaacatgccgttactcattttaccgttacagagcgaattaatgattacaccttgctggaattgaaactggagacaggacgtactcaccagattcgggttcacatgaaatttatcggtcacccgcttgtaggagatccaacttatggacggaataaaggcatcaaaatgcaaggacaggctcttcatgcggctattcttggatttgtgcatccaacaacgggagaataccttgaattttcagctccgattccgcaagatatggaagacgtgcttgcctcgctgcgcagtcgttaacagttccaagaaagtacaaatgttcggatactttgtccatggctttgatcacgcaaatgcttcatattaaagtgtagaaatttgcgtcaaatgaggagatgaacaacgttatgagtatcgataaatatcaagaaacttacattcagactaattttgccgaccgtatcggtggctccaactatggtaaagacacgaacatttataaattcgagaaaatcaaacgtgccaaagcttcggccaaaaaagattttcccgatgtggaactgatcgaccttggtgtaggtgaaccggacgaaatggcggatgcaggcattgtagctgcacttgcagaagaagcttccagacctgagaaccgtggttatgccgataatggtattcctgaattcaaggctgctgctgcttcttacctgaaaaacgtattcaacgtagaaggtatcgatgcagatactgagatcgtacactccattggttccaaaccggctttggctatgatgccttcatgcttcatcaatccgggtgatgtgacaatcatgaccgttccaggttacccggttatgggtacacatacgaagtatctgggtggagaagtgttcaacatccaattgacgaaagagaacaacttcttgcctgatctgacggctatcccggaagacatcgcaaaacgtgcgaagttgctctacctgaactatccgaacaacccaacaggcgcaagcgcgacggtggagttcttcactgaagttgtggaatgggctaagaaatataatgttgtggttgtacatgatgctccatatgcagcattgacgtatgatggcaaaaaaccgttcagctttctctcggtacctggtgcgaaggatgtcggcgtagagctgcactctctgtccaagtcctacaacatgacaggttggagaatcggatttgtagcgggtaacccgcttgtagtcaaagcattcagcgacgtgaaggacaacaatgactccggtcagttcatcgcgattcaaaaggctgctgcttatggattgaatcaccctgaaattacggaaaaaattgcagagaaatattcccgtcgtcatgacatgctcgttgccgcactgaacgaacttggcttccaggctgaaaaacctaaaggttcattcttcctgtatgtagaagcaccaaaaggtgtggttggcggacgtcgcttcgaatccggcgaagatttctcccaattcctgattcgtgagaaactgatctcatccgtaccttgggatgatgcgggtaactttgttcgtttctctgtaacctttgaagcgaagggtgaagaggaagaaaaacgtgttattgctgagatcaaacgtcgtctgagcgacgtacaatttgaattttaatcgcatcacccaatagttaaatcatgtactaacgaagagaccggaaacggtctctttttttatgcccatattagaattttttcatttactccctttacaaaattatacaagcaacatatgattagatctttacgttatttcttatatacagaagttgttgttgaagggagttattacaattgttatcatcacgaacaagtacggtgtcctcaccggctacaggaacaggcagtacagtgtcaggattaatcagattgttaagacccaaacagtggactaaaaatctgctgttatttgctgcgttactattctcttttgaggagattcggactgaaaccattcttgcgacgttgcttggttttattctatttagccttgttgcaggctgtgtgtatattttaaatgactttgtagaccgggacaggtatcgacagcatccggtgaaaaggtatcgtcctatggcttctgggcaggtgaatccgagtcatgctttgttgtttggcattattctattaatcctttccgtaggaacggccttcatgatgaaccctctattcggggtgttatgtatcgtctatttcctgttgaatgtatcgtattcatttgtgctgaaacatctcgttatcctggatatgatgaccattgcagccggctttgtacttcgtgccattgcaggtggtgtgctgatccatgtgccattcacgccgtggtttttgatctgtaccatgctgttgtcgttgtttttggccattggaaaacgcagaaatgaactcacgttgcttgagggaaatacgggatcacatcgtaaggttttggataactactccattacattactggatcaattcaatacaattgtgacgacagctacgattatcagttattccctgttcacattcacttcagatcgaaccattcatctcatgtggacgattccattggtcatttacggcatgttccgttacctgtatctgatccacatgaagaaccagggaggttcgcccgatcgtgtgctgtttgaggacaagcctatattaattacggttatgttgtatgtgataagtgttgttacaatctttgcaatctttgaataaaggctgagggggatcagggtgaaaagcacgaaagtcgcaatttttgatattgataaaacgatcatacgcagtgattccatgtttcaatttgtgcattacggtgttcgccgttacccgtggcaggtatggagattacctgtcattgcattacataccgtgttattcaaggcaggcttcatgacggttgaacaagtcaaacgatcctactttcaagaaattgagcgtatgtctgaaaaagatctcgaacatttcttttatactcgcttgcgtacgtccatttttgccgaggccagtgtagagatgcaacatcgcaaagaagcagggtatcatgtcttgctggtaactgcatctccgcatgcctatatgaaatactttaataattttccctgggtggatcatgtaattggaactgaacttgtccgtcatgagaatggttacacatgcagagttgacggcagcaactgcaaaggggaagagaaggtacgccgaattcaggcttatctgagtgaaaagaatatggtcattgattatgaccagtcatgttcctactctgactccttatccgaccttcccgtcatgcaacttgtgagtcaacgatactttattaacaagcgtgttccggacatggaggcattaacgtgggggaaataaaatcgcgtcatactggtaaatggttaatgctcgtttccgcttttctgacagcaacgggtcaattgttctggaaatggggactaaccgagtggatttacctgggtgtaggttttctgtgttatggacttggagcgattttgatgattaaagcttttgctctggaaaaactctcagttgcttatcctctgatgtgtgccagctatgtatttgccttaatctatgggtattttttgcttggggaagaaattacgatgcagaagctggcagcagttgtgttgcttggaatcggggtgacactaaccagtgttgatcgatagctggatggttgccgtattaattgtcatgacgttgtgtggtgcactgggtggggccggactgaaagcttatgcttccagtcgcaatcgtctgcatgtactcatgggacttggattctacggaacgggcgcgttgctgaatattgtattgctgaagtttcttccattaaccgtagtgttgcctgcgaacgcattaacatatgtgtggactcttatcatagctcggctgatatttaaagagaccgtgggccctttacgctggataggcgtggcatgtattatgggcggcctatgtttattggtattttagaacttaattaatcaggatgtgaaatgaaagcatgaactttttagattacttattttataatcgcagagccaactggacagccttttacctgtttgcgggatttgctctgttctatggtttaatgaacggctcgtatgttctgtacattgaaaataatgcagaggtgcttggggcgtataccccatttaatacaacgctgtttccaatcaatttattcaactttgatccttcaatgtattatggggacaacagttcttccgtgatccatccgctgatttcctttctcgcagtcacccttgcggctgtagcgaaatttctgggaggcaactggttctttctaatcctgcaatcgatgataaatgcgggttcagtggtgctggcgtatctgttcctgagtcaaaaagaagataaaccgaccatcataccgctactgtttgccttgctgtttggtttcagttcctatctgatgtataccgcgttgatcccggattcgtatccttatgtacagttcgttattctgttgtcggtggtttacatgcagtatactcgtgagcgtcaggacgtacgttatgtacccaatgcattgcttgcatcgattaactttggactaacctcgaccaatatcgtaccatttgctgctgccacattctttaatatgaatacatggcgcaataaggcgaatttgaaaaaatacatcggcatcatggcactggcggttctgatcatcgtcgtattaactggcattcagtatgttgcctttgggggccgtagctgggttagtaactggctgttgggcattcaaaatggtggaacaagctatgcaacaccattccagttcgctgttcactggaaagcattgaacatgttaacgattaatccaatgctgacaccgaagatgcatttactggacccgggcatggcagcctttgttacggatctatcccgttccaatccaatccatgtgcagatgacaggtatctttattttactactggcattcatgggcttcattaagggcattcgtgaacgtgaagtatggacccttgtgccatatattctgtttgcctttttgcttcatgtcgtcgtgggctttggtctggctgtatttcaatacgatatgtacctgtatgcggggcactatctgtttgcgttcttcctattgggtggaggttttgtgatcagccttcgtccgggattggggaaaaaagtggttataggcttgatcatgttatgtgttatcgtcacggcaagtaacaacatctatcgccatgtagaaacattaacaacaatcaaacaatcctatgatcagttggaacaggaacgctcagtgaattaatcaaatagtaaatgtatcgattcatataatgaaacgagaaaaggccattggatggaaagtccaatggtcttttcttaattagtgttgagcaaatgagttaagcaataattttggtcttcttggcattctcggctgaacgtttggtgagactgctgagtggacgtttcaaagcgagagcaacaatgagactcagcgcgatgaacatacataaccacagaatatccttgatggcagtagaccacaatatgccgccgaccgactcacgcagcagactgatcgcatacgtgaagggcatgaacggattcaatgcttggaaaaagggtgatgtcatgctgattgggaacgtaccgccggagctggagaactggaacaccatgaagataatggcgatcccttttccgatatttccaaatacggacagcagggtgtacgttatggtgacaaatacggcactcaccagcatggcaaacaggacaaaccacagtttatctgcaacataggtacccaggattaagatatctcccagggtgacacatatcgcctgaagtaacccaatggtcagaaaagtagcgagacgtccaagatataactcatatccccggaacttgccccctggattttcagcttcggcacgaagcagagaaatcaacagtgttgagccaacccacaaggacagcacgccataaaatggtgacatggccgatccataattcggaatcggataaagctgttgttctttgatttgcacgggactcgaaaggaaagcactctcttcctcaatgtcgccgcgcagaagcttggcaagttcggcaaactggttattaccttcaacttccctgagcttgtccgcagccttgctgatggcactttccaatgctggcagatcatcacgtaccagcgtggcaacacgatgtactcctttttcgacctccggaagctggttctggacaaaatcggatgccttgcctatctttttctcggcattaggcagatcattacgaacaaaattagcggcttcgttcagtttgtttcccagcttgggcagatcgtttcggattaatgaagacactgtgttcagagcttggataaaaccttcacttttgttcgcgagtgtctctgatatctcatggatcttagattgtatttgaggcagttcgctctggatttttgtcaactctgcctgcccaaacgtaattccttctttggctgatgcaagaatgtccgcaatatccggaatacgatcttttgctccttgcagagtttctgctgaagtggagagggtagacctgagcttatccgcaccagctgcaagtgcaggcgatatttcactttcataggtgtttaagatattgccaatcccgctgctgatgtccttcgagagagtatttaactgagcgatgacgtctatcggtggagttgtattacgacgcatggcatcactgatgatgctagccaagcggatttgcaactgaagtttatctgaaatggagttcagttgtgtaattttatcggcaagtggttggcttggaagcaagttattgatgttgcccagtagttctgccatactgtccacgagttttaccgcaatccctaaacgtgaagcaatccggtcgagatcttctgctgtaggaaggttattaagatccgaattttgcaattgtgtaaatacttctcctgcagcgttagtaatctgctgcaccagcagcagattttggcggatcgccgggccaattgtatgaaacgcttcttcactggaatccacgaactgatttaatccctctgcaagctcaatcccgttgccagcgatttgtgatactttgtccaaatcttgctctgttgccgttacgatagacagagctttgttggttttatccaacgccgtttggatgacatctgctacctggccaaagttttcatccacttctcgaatgcgttctaccgctttttgtatatccggtatccgcccttgaatagccagcacttcggaagccgcatcattaatttgtggccaatactcctgcaccttgagcacatactgtgctgcttcattgatttcaggcagttttttctcgatttcaacgatcttttgagcatcttttacaatctcaggcatggctttttctacttccagaaccttttgaccagcggcttgaatagccggaagatttttctccagcgtaaaaatgccattctccatcttgcgcaatgttggaagctgggaattaatctcaaccccggcttcattcaacttggttagaacggcctcactgacggcttcagtgaaattttcattgatttgtgttgttatggcagatacaccagagcctgtgattttaggagcaatggcatttaccttttcattaacggtatagattacctctgggcgttccagctttccgtcaacgatacctgtaattttggacgaaaagtctccgggaatgagcaggcttgcataatactctccagtttgcacaccccgattagcctcagcctggtccacaaaagtccagcccagcttttcgttgtgtttaaggctggataccagttcgtctccgatattaacatgggttccttcaacagtcgcacccttgtcctcagttgtcaccgcaattttgatcccctgggtattactgtatgggtcccagacggacttcacgttgacccagtcatacaccccgggcagtagaataatagccacaattagaaatatacctgtgggaaccttcagaatatgcaaccagtctgttttgtaaacgtgccaaatgtgacgcatgacttcctcctaaatgtacataaatgtagggcgtaacttatttctatgtcgtaaatttgtgaatcttatgtatatcggcattattgcagtatctaataatgggttcatgtttataaactgtacccatttcacttggtactaattcagagccttcatatattgcgtaaaatgaaactcaccgtttgttctaaaaagaagtgttttgtctctacttgagtacagtaagaggtttattttggttatatcaaatttctcatttgcctatggataaatatgcagaaatgttgtataattatgaataaccaatgagatgtattgtgcatggatgtttttcagcctaactgctgattctaagaagaacgtagcagagggttttcacctgcgatggtgaggtgttgacagggggttgtctttctgtcataattcatgaagacaaacggacatattgattacagaaccctgtgaggttctgcaatatgaacgacatgaatagcacctttaaatcagtcccgtgagactggcaaggtaacgtgaacgatacatcgtttttttgctgcggcaaatgaagcgatgcatccccgagagtaaactttcttcagagcggtctgaagttcggagactccttgccaataaacacggcaaggagtcttttttttctcctcgtcacggggccatgatgctgaagggaaatcctgaggaggctgaacgcatgagcacagagacacatgtcattatggatgagacggcgatccgccgcgcattaacacggattgcccatgagatattggagaaaaacaaaggaatcgacgattgtgtgttggttggtatccgtacacgcggggtttacctggcagaacggattgccgccaagattgaagaaatcgaaggcgccaaagtcccctggggagaactggatgtgactccttaccgcgatgaccgcttggacgaaaataaagcgaatcgcaaggaaatgttgattatgacacctgaatcactttcgatccataacaaaaaagtgattttgttcgatgatgtgctctataccggacggacgattcgcgcagcgatggatgccctgatggactgtggaagaccgcagaacattcagctggctgtactcgcagaccgcggacaccgggaacttccgattcgacctgattttatcggcaagaatgtgccgacttccaaatcagaggagattgaagttgcactcatggaaacggacggacaggacgaagtcaaaatcactcagaaccggggggagcaagcataatgattacacagacagcattgagagaccgaagcttgcttggactgaaggaacttagtcgaggagaaatcgagtccattctgaacagagcggctcactgggaagcgcagaaagagaaactggctcctgtactggaatcacgctttgttgcgaacatgttcttcgagaacagcacacgtacccgcttctccttcgaaatggcagagaaacgcctgggcgcacaagtgttgaactttacggcagccgcatccagtgtggaaaaaggagagtccatctacgatacggtacgaacacttgagtcgatgggcattgatgcaggcgtgatccggttgaaaccggcaggcgttctgcaacaactggctcagaaagtgaatgtaccactcgtgaacgccggagacggcaacaatgagcatcccacacaggcgttgctggatctatacacgatgaggaaagcatttggcgaactgaaaggcttgcgtgtctccatcattggtgacatcctgcatagccgtgtagctcgttccaacctgtgggcactgcaaaagtttggtgcagatgtacgcttctgtgcaccacgaacgatgcaggcaccggaactcgcagagcatgctccttatgtcggtcttgaagaagcgctggatgcagatgtagtcatgatgcttcgtgttcaactggaacgtcatcaacatggcttaattacttcagctgaggattatcgcgaacactacggattgacggaagaacgggcatcacgcctaaaaccaagcaccattatcatgcaccctgctcctgtgaatcgcaatgtcgaggtagatgacgcggttgtggaaagtgaagcatcgcggatcttcccgcagatggcaaacggcgttccaatccgcatggcggttatggaacgtgcgatgaaactgtaacagggtctggctgtaggtcataggctgacggtacggtagttcttatagagcaataagagagtacacgataaagaaaatcaaccggcttgcctggtaagccggacagaaccgaagcggagggcaattatgctacagattataaaaaacgcgaacgtcttgaaccaacaaggggaacttgaacggaaaaccatcattatagatgaaggtaaaattaaaaagatcgctggtctggaagaccaagccgttctggatgccgaaaagtcagcgcaaagtgtgacagacgcatcaggcaaactggtcattccgggattgatcgatatgcacgtgcatctgcgtgaacctggattcgaacacaaagagacgatcgagacaggtgcccgttcagcagcacaaggtggttttacaacaatcgcttgcatgccgaacacgagaccagttacagatacagaggaagttgtgaagctggtactggataaggccaaagaagctgatctggttaaagtgttgccttatgcagccattacaaaaaacgaactgggtcgtgaacttaccgattttgccgcattaaaagaagcaggcgctattggattcacagatgacggtgtaggcgtacaaaacgctcaaatgatgaaagatgccatgagcctcgcagcaagcatggatatgccagtgatcgctcactgtgaagatgactcactggttgttggtggatatgtgacggaaggtgagttttcgaagcgccacggcatcaaaggcattccaaatgaatccgaagccattcacgttggccgtgatatcctactggcagaagcaacgggagtccattatcacgtttgccacgtaagtacagagcaatcggttcgcttgattcgtctagcgaagtccatcggcattaaagtaactgctgaggtgtgtccgcaccatctggtgttgtcggatgaagatatcccgggcatggacgccaactggaaaatgaacccgccgctgcgctcaccacgcgatgtgcaggcgtgtatcgaaggcttgctggacggcacgctggatatgatcgtaactgatcacgcgccacacagtgaagaagagaaagccaaaggcatggagctggcacctttcggaatcgttggattcgaaacagccttcccgctgctgtacaccaagtttgtggaaacaggactctggagcttggacttcctggtgaaacgtatgacagctgatccggcacgtgtattccgactggatacaggcaaactggaagagggagcaccagccgatatcacgatgattgacctgaacgaggaaaaagcggttgatcctgcaacgtttgcaaccaaaggaagaaacacaccattcacaggttggaagctgaaaggctgggccacacaaacatgggtggacggcaaaagcgtatggagcaacactgtacaacaataaaacggtaactcagcaaatttataaatcagtaatctttaactctttatatcagtaacagtaattcttaacttttttaaaacaacaaatctttttaaatctagctctagctctaactctaaaacttaatctataactttttacaccagtaacatcttttcaactaactcgaggcaaatcatgccgagagtctaacatacgaaacaaagcaaagttgaatgtcatgattttgaacttggacaccaacgtaactgcggagcggacagaaaagacccgaagaagcaaagcgttcgcctttatcaccgaattacatcatttaaaaaatgataaaaagtaatccggtgataacagcgatcaaagggttttctgtacgcggagccgcacaatcgtaacgtcccccatgttcaaccccaatgcattcaacgttgataaacacagaggagtgaaatgggatgcaggcacaggcaagattattgttggaagacggcacactgttcaccgggaaagcatttggtgctgaaggtgaaactacaggtgaggtcgtttttaatacgggaattacaggctatcaagaggtgctttcggatccttcctattgcggtcaaatcgtaaccatgacgtatccgctgatcggaaactacggcattacgcgtgatgactttgagtcgattcgtccatacgtacacggttttgttgtgcgtcgtcatgagccaacgccgagtaactggcgtgcggaatacagcgtagacaatctgctcaaggaatacggcatcgtaggaatcagcgaaattgatacacgcatgttgactcgccggattcgtcatcacggcacaatgaagggaattctcacaacaggatcgaagcctgtggaagaactgctggagatgatgggagacaccactatcgccgagctgcgtaaccaggtgccaatgacttctacagagcatgtctacaacagcccgggaacagctgagcgtattgtgctcgtggattatggtgctaaaacaggaatcttgcgcgaactcagcaaacgtaactgtgacgttgttgttgttccacacgatgtaacagcagacgagattcgtcgcttgaacccggacggtattcaactgtccaacggccctggggacccgaaagacgtacctcacgcagttaacatgatcagtgaattgcttggcgaatacccgatcttcggtatctgcctgggtcaccagttgttcgcacttgcagcaggagcagacacggaaaagctcaagtttggacatcgcggaggaaaccacccggtgaaagaactggagagcggacgttgcttcatcacatcccagaaccatggatttaccgtaaacgaagagtctgtgaagagcacggacctggaagttacacatatcaacaataacgataagaccattgaaggtctgaaacataaatcattcccggcattctcggttcaatatcaccctgaagcagccccgggtccttacgacaacagctatctgttcgaccgtttcatcgagatgattcgcgagcacaagatcactaacccgcaaaagccgcgtcaagccgtattggcagccgcagtgaaaggagcacaataacatgccgattaacaaagatctcaaaaaaatcctggtgattggttccggtccaatcgtcatcggtcaagcggccgagttcgactatgccggtacacaagcttgccaggctctgaaagaagaaggcgtggaagttgtacttatcaacagcaacccggcgaccattatgacggatacaaacatggctgacaaagtctacattgagccaattacactggattttgtaacccaaatcattcgtcaagagcgtccagatggcttgttgccaacactgggtggtcaaacaggtctgaacatggcggtagagctggctcgtgctggcgtgctggaacgtgaaaatgtgaaattgctcggaacacagctgacatccatcgagaaagcggaagatcgtgatctgttccgtgacctgatgcgtgaattggaacaacctgtaccagagagtgtcatcgtaacgacacttgaagaatcacttgaatttgcgaatgagattggttatccaatcatcgtgcgtccagcctatacactgggcggaactggcggcggaatctgtgcgaacgaagaagaacttcgtgagacggtggcagcgggaattcgttacagcccgattgggcaatgtctggtcgagaagagcattgcaggtttgaaagaagtcgagtatgaggttatgcgagacaaaaacgataactgtatcgttgtctgcaacatggaaaactttgacccggtaggtattcatacaggtgacagtatcgtcgtagcaccaagccaaacattgtcggaccgtgaatatcaaatgctgcgttcagcttccctgaaaatcatccgtgccctgaacatcgagggtggatgtaacgtacagtttgcactggacccacacagcttccaatactatgttatcgaagtaaatccacgggtaagccgttcatcagctctggcttccaaagcaacgggttatccgattgcaaaaatggctgccaaaattgcgatgggttacacgttggatgaaatcgtgaacccggtaacaggccaaacgtatgcttgctttgagcctacactggattacatcgtgagcaaaatcccacgctggccgttcgacaagttcatctcggcgaaccgtaaactgggaactcagatgaaagcaacaggcgaagtaatggctattggccggacattcgaagagtcgattcacaaagcagttcgttccctggaaattggcgtacatcgcctctacctgaaggatgccgaaacgctggacgaagctaccctgaacgagcgtctgatcaaagcagatgatgagcgtatcttcctgattgccgaagcgttccgcagaggttatacgttgcaacagctacaggatctgaccaagattgactggtggttcctggacaaaatcgaaggtctgatcgcattcgaagatcgcattcgcgaagaatccgaattgtcttccgacattctgtatcaagcgaaacgccttggattcacagaccgtgccattgctgaactgcgtgcgcaaggtcaaccaggaggcacattaacaactgaagcggaagttagaactcgtcgggaagcagagaacctgcgcccagtgtacaaaatggtagatacatgtgcggctgagttcgaagccacaacgccatattattactcaacttacgagacagagaatgaagttatcccttcagacaagaaaaaagttgtggtactgggttcaggaccaatccggatcggtcaagggattgagtttgactactctactgtacacgcagtatgggcattgcaaaaagcaggctatgaagcagtcattatcaacaataacccggagacggtgtctacggactttaatacatcggatcgcctgtactttgaaccgctcttcttcgaagatgtcatgaacgtgattgaacaggagaaaccagtaggggttatcgtacagttcggtggtcaaacggccatcaacctggcagcaccattgcgtaatgcaggtgtaacgattctcggaacggatctggaaagcatcgatgaggcggaggaccgtaagaagttcgaacgtctgctctcccgtctggagattgcacagccaaaaggtaaaacagtcatttccgttgatgatgcggtagaaacagctcaaagtctaggctacccggtattggttcgtccttcctatgtactcggcggtcgtgcgatggagattgtatactccgatgctgaattgctgacatacatggaacaggcggttaaaatcaatccggagcatccggtcctgatcgaccgttacatgatgggtaaagaagttgaggttgacgccatctgtgatggtgaaacggtattgattccgggaatcatggaacatatcgagcgtgcaggagttcactctggtgactccatcgcggtatatcctcctcaacatctgtcccaggatttgaaagagaaaattgtagagattacaatcaaaattgcgaaagaactgaaaacagtaggtttggtcaacatccagtttgttatccatgatggccaagtgtacattatcgaggtgaacccgcgttcatcccgtaccgtaccattcttgagcaaagtaaccaacattccgatggcaaacctggcaacacaagccattctgggtgtgaaactgaaagatcttggttatgttgacgggctgtggcctgaatcggatcatgtatctgttaaagttccggtcttctccttcgcgaagctgcgtcgtgtagaaccaaccctcggacctgagatgaagtctacaggtgaggttatgggtcgtgacccgaattacgctaaagcgttgttcaaaggtctcatcggtgcaggaatgaaaattccggcaaccggagcgatcgtagtaactgtagcagacaaagacaaagacgaagcggttcctttgctcgaaggtttctacagactgggttacaaaatcatggctaccggcggaacagcagctgcgcttgaagcagcgaacattccggtaacgactgtgaacaaattaagtgaaggttcgccgaacattctggatatgatccgtagcggcgaagcaaactttgtcttcaacacactcaccaaaggcaaaacaccgcagcgtgatggattccgtatccgtcgtgaagcggtagaaaacggcattgtatgtatgacttcattggatacgattcgtgcgctgctgatcatgctgcaaacgatcaacttctcttcggaagcaatgcctgtctttgtaaaataaataactctctgatgaaggacatcagtcagcctgcgggctggcgggatgtcctttatatcgggcaaaaacggaaaaaatgagcaagtggaggggagcgctggtgatgaatcaagcgagtttcaatgaaatggctggccgtctgatggtggcactggattatcctggagcggaagaagctcaagaattggtacaagctcttgagggcattccatgttatctcaaggtgggtatgcagctgttctacgcagcaggacctgactttattcgggagctaaaatccaaaggctactccgtttttctggatgtgaaaatgcatgacattcccaataccgttcgtggcggagctgagagtatcacacgtctgggtgtagacatgttcaatgtacatgcagcgggtggagccctcatgatgcgtgctgcacgtgaaggggctgaggcagctatagctgctgatccttctctacagagacctgagatcattgcagtcacccaactgaccagtacaagtctggaaacgatgaataacgagattggcatcccgggaagtgtggaagctgctgtggtccgttatgcaggactagcccaagaggccggactggatggagttgttgcttctccactggaagtgcccgcaattcgggcaacgtgcggcagtgcttttcacaccgttacaccaggaattcgtccagcgggtagcggtctgggagatcagacacgcgtcttgacgccaggtgaagccatcgccaaaggcagtcattacattgttgtaggcagacccattacaggcgctcccaatccgcgagaagcggtagaaaccattttgaaggagatgttgaacgcatgatcgaactgaatgagattccgaatcatattgcttcccaacttttgaaaattaaagccgtggcgttacgtccgcagcagccatttacatggacatccggcatcaaatcaccaatatactgtgataaccgcttaacgatgtcctatccggagattcgcaacgatattgctgaagcatttgcaacaatcattcggaaccagtacccggatgcagaagtcatcgcaggtacagcaaccgcaggtattccgcatgctgcctgggtggctcagaagctggatctgccgatggcctacattcgtgataaagcgaaaggacacggaaaggagaacctgatcgaaggtctgattaccgaaggacagaaagtggttgtcatcgaagatctgatctctacaggtggaagctcgatcaaagcagccgaagccgtacgtgtagcaggcgcaacacctctcgccgtacttgccattttcagctaccagctggataaaggtgttaaagcatttgaagatgctggaattccacttcagacgttgtccaattacacggcgctgatggatgtggctttggctcagggaacgattcaggagagtgattttgaattgcttaaatcctggcgtgaagatccttcttcatttggtaaataatatcattgatacctcgaaaaaatgttcaggaatgaacggtatcaaaattgtaatgattgccgtcatagcggcaaaaccatcgaatatgcaagaggcatcccgcactttggggtgcttttttcgtttgttcatcaaaatattaactttttccctctaccgttgtaaaaagcttgtaacttttagttgggatcggtcgtttataattcagtgtaggatggaacagatttctaattttaggttttttgaagaaatgaacgggacttcaagaaaggatgagcgtgattgctggcatgaagaatttatttctcagaaaaagacctgccaagagccagtcaggcgatgaacatcaacagggggaaacgccgttggaggcatcgacggagtcgggggaaaatacatacaacaatgaacatgattacccgacgagtaaacctccgttacctgaaagtgaaatcgcttcagatgaagtggctgcagctgctgtcactaccgttgatgaaccccagaagaagatcaaaccaaagaaggatatgctgcctccatatgatggacctgtactggaggtgcgtaacgtgcatcgcagtttccagacaggcagtcgcattatccatgtgctcaaaggcattgatatggaagtaaatccgcaacaactggtcatgttgaaggggcgatcgggctcaggcaaaacaacactgctgaatatgctcggtggactggatcagccttcaagtggagacattctgttctctggtcagcctcttcaggattggggagaccggcggcggaccgctttgcggcgcaaagagatcggttttattttccaggcatatgcactcatgcccttattatctgcttgggaaaatgtagaactgtcgctgcgcatggcggacgttccgcgagcggagtggaaggacagggttggtcactgtctggatctggttggactatccaaacgggtgaagcaccgacctttcgagatgtccgggggagagcagcagcgggtggctatagccaaggcgattgcccatagacccagattgttgcttgcggatgaacctacagctgaactggattccaagatgggcgctcaggtcatggccgtattccgcaatattattgaagtagaacaagtaacaatatgtatgactacacacgatcctacaattttggaggttgcggaccatgtttatgaaatggcggacggcagatttatcaagtaaaggggccgctccgaagagggggaaacgcgcagcgattattttactcggtgcgataatggttgcaacgatgtccggctgctcattgctgccgtcagaaacagaggaagaagtgcttccgcctattacaccaccgacgatctccaagaaaccggaatatgaagtccggacggaaacgttggagaaaaaagtaagtggcagcggcaagatgatgagtcagcgggaagagaaggtgtacttcacgcttgatggcatgcatgtcaaagagttaaatgttaaaccaggggataaagtgaaaaagggtcaacttcttgctgtcctcgatgtggagagtgtagaaaaggagatccgtggcaagaaactggctattcgcaaatccgaagttcaaatgaaggaaacactccgcaagaaggatgagatggacccggtagagttcgaagaatcaacgattgcgtttgaagaactacgccaggaactcgctgatctggaggaacaactgggcaaagccacgttgacagctccgtttggcggcaccgttattgcagtgcaggtagagaagggtgcaaccgtgaaagcgtatgatccgattgctacgattgcggatacatcgaatctggttgtggcagctacctttgccaaggaagatctggagaagttctcggccggtatgaaggcagaagtagatattaatggagctggtaaagtcgctggcaaaattaaagttatgcctatcgcggaagcatcgggaagcggcagtggcgaagggacgggtgaaggcggtacgcctccaaccaaggaaacgctggataagtatgtcatcgttacacttgcaaaaatgccaaaaggcgtcgaacgtggcacaccactatcggtctcgattgtaacgcagcgtaccgagaacgcaattgtgattcctgtatccgctttacgctccatcggttcaagaacgtatgtacaagtggtggagagtgatggcagcaagcgtgaagtggacgttgaagttggacagcagacatcgacagatgtcgagattctgaaaggtctgaccgtaggtcagaaagtagtgggacgctaatggggctgccattgcttcggctgctgttccgcaaaatgtggaacacgcgctggatgaccttcagcacactgatcggattgattgtggcggtagcgttcaccgtcagtattccaatgtatgccgatggtgcgttgaaacgggtcgtcgcgcaaacgctgcaggataacagtgaagggttgccagccggttcgttgctgatgagttatcaggcacctggtggcgtgaagacagacacacggggtctggatgaagtagatcgttatattcgtgaggatgtccctcgcgacatagggtttccttttcatacttatgtgaattcgagatccattcgcagcacagaagtgagcccggaagatccaaccaaagtggatgccagcagggcgcgcagtatgagtctgggcacgatgagtggactggatgcacaggtgaattactctgccggggtgaaacctggaaaccaggtcaaagatgacacgatcgaggcagtcatgttggaagagggtatgtaccgtaacgacctgcatatcggcgatattctggaatatccggtgtatagcggtcttgatatcacgttacgtgtaaagattacggggtccttcaaggcagatgatccaaacagcccttactgggtacaaggatttgacggcatgatgaatggactatatgtggatgaatcggtttttaatgatgttttactgaaggaaaaagggattccacttcaaaattcacgttggtattatgcctttgatctgaaagaaattcaaaccagccagttatcaggtctgacttccatgctggaaaggctggatatcgatctgtaccagcggctgaaagatacaaaagtggacatcacctttggtgatctgcttaagcagttccgcagtcagagtctgcaactgcagacgatgttgtttaccttggcagcaccgatgattgcgatggtcttttattttattgccatgaatgccagacagtcattacagaagcaagagagtgatattgcggtattgcgcagccgtggagcttcagctcgacagatcttctctctttacctgcttgaaggtatattcctgggcgttattgcgttgattattgggccgttgcttggttggtttatggccaagagtattggctcagcaagtggctttctctcgttcgtagatcggaagtctattccgatcggtgtatcaaaagaagctattctcctgggtgtagcagcggtccttgttgcgatcatcgcatcacttatccctgcgataacctatgcacgggcaaccattgtatcagccaagcggcgacaagcacgtacagaccgcgctccagtatggcaacgctggttcctggacgttgtgttgctgggtctggctggatatggatactacctgttctatgaacgtcagatgttgaccttccagaccggaatgacaaccgatcagttgcaggtacagccgtttctgttctttgtacccgcactcgcgatctttgcgcttggacttttcttcctgcgcttgttcccgtggattttaaagctcattcagctgatcggtcgcaagtttctcccggtcccgttgtatctgacattaacgcagctatcgcgatcatcttcttcctattatccgctgatgatcctccttgtactgacactgggacttggggtgtacaactcggctgcggctcggacgattgatctgaattccactgagcgtaccttgtaccgttatggttctgatgtgattatgcagactgtgtgggaaggaacacctgaggttaaacccggtggttccggacagaatggcggtacgggtggaggtcaacaaggtggtggcaatggaggaggaggttctgctggtggtggttccggcggaggcaatggcggtggaggtgctccaggtggtggtggtggttcttcgcagccatccaaagtcatctactccgaacctccattcgaagtgttccgcagattagacggggttgaacatgcagcaagagtactgcagactaaaggtaatattatcgtctctggtaaatcgggcggacaggggatgctggtcggaattgataatgtggactttgctcaagtagcatggttccgcaacgatctgttcccggcacatccctacaagtaccttgacttgcttggtaaatatgaaggggctgtattgatctcctccaaatttgctgacaagttcaaactcaaaactggagacctcgtctctatgggtgtacagggacaggcgattgaattcgtcgtgttcgggatcattccttactggccagcccagtatccagatcagatgccattcttcgtggctaatctggattacatctatgatcaggtgcctctgattccttatgaggtttggctgaaaatggaaccggatgccaaagtggctcctttaatggagaaacttgcagcagaaggcattgagttatcgtctgtgcgtgacgtacgtaccgaattggtatctcaggggaaacatccatcaagaggtggtgtattcggaattctgagccttgggttcctggtatcagttattatctcattgatcggatacgtgctgtactggttcttcaacctgtccggacgtgttgtgcagtttggtgtattacgagccatggggttatcacgcgcacaactgagcggtatgctgctgctggagcaggtgttcacagcggggttatcgatcctgctaggtattgggattggtcaggtatccagtcgtttattcctgccattcctacaaacgacggataatgtttctgctcaggtacctccgttccggattgtgtttgaacagcaagatatgttgcaactgtatggggtcaccgtagtgatgctggtcattggtgcaacgatgttactctggcagattcgcagattgcgggttcaccaggcagtcaaaatgggagaggagaggtaaacgtgatccaatgcgaaggacttgtcaaaatttttaaatccagcgatgtggaagtcgttgcccttcagggcctcaacctgactgtcaatcaaggtgaaatgatggcgatcatcggtaacagcggtagcggtaaatccacgctgctgaatattctgggcgggcttgatcgtcctacagctggtacggctgttgtgggagactgggatttgctcaagatgacagatgcccaattggtcgaatacaaacgtcatacggtaggttttatctggcaaaataacggtcgtaacttgctgccttatctcactgcactggaaaatgtggagactcccatgattctgggaggcaagcgtgatcgtgcttacgcaaaacagttgctcgaatgggtaggccttaaggatcggatgcataacaaattgcatcaattgtcaggaggagagcaacaacgggtagcgattgcgatctcattatccaatcgtcccaaaattctgcttgcagatgaacctaccggttcggtcgattccgagacatgtgatacaatcatgggcatttttcgaagaatgaacaaggaactcggcgttacgattgtcatcgttacccatgacttgacgcttgctggcaaggtggaccggatcgttgcgattcgggacggcttgaccagtaccgagtttgtgaagcgcaacccgaatcttgatgatgagcacaacttgtccgaggcgggtatgccagacatccatgaagcatttgtcattatagaccgtgcaggacgacttcaggtgccaaaagagtatctggaggccttatccattgataaccgggcgacattggaatttgacggtgaacgtattgtcattacaccgccaagataattaagagggggaactgggaaatgaagaatagtatgtggggaaaacgtgtgctggctgtcatcgctactgcgacactagcactgccgctgattgccggctgtacggcaagtgaggccaaggatacggagcagcgtgtattacgtgtggctacgttgtggggaggacaggatgacagttacttccgtcagcaatttaccgatgcttttgaattgacacatcccaatgtaaccatcgaaattgtagctgctgttgatcagagcagtatgtatgggtatggcaacacggaagaacagccagaagttccagatacaatggaaagtctgaagaagattatgactggggataacccggttgacgttatcgtggccgataccgccacagtgaaatcattaattcaggagaatctggtgaaacagctggaccctttgatgcaggaagataagtttgataccagtgatattgtgcctagtgtactggagggaattaaggaccttggggatcagagcatttatgcattgacaccaacgttctcctcatcggctttgttctataacaagggtatgtttgaaaaagcaggcgtggaaccgccaacggacaacatgacatgggacgatattttcaatctgggtacccgtctaacgaaaggtgaaggtaaagatcatgtatttggtttctccttcacgacatatcagggtggttcgccgtactactccatgcagcagtactacagctcgttgcagctgaagacgtttgatgacaaagcagagaagatgacagtagattctcctcaatgggagaaagtgtggagcaccatcagcaaacttgcgattgacaaagttattcctaaaggcgacgaaccgcaggatcagaatccgaatggacgttatgatccagtacagggtgacctattcctgagtggcaagtcagccatggttattggtgattacagctatattaatcaattaattgatgccaataaaaatgcggataaaatgaaagactttacgaaagtggattgggatgtggtaacacctccagttcacccggaagctcctgaaattggaggtagcatctacctgagcaatctcatggcgattaatagtgcggctcagaacccggatgatgcgtgggaactgatcaagtacatgaacagtgaggactgggctaagatcaaagcacgtagcagctatgagatggtatcacggaagagcttcattaagcccaaagacggcctggattataacattcaagctttctatgcgctgaagccgattccgccaacaaataccaatctggataaaatgtatcaaaaatccccaggcttatggcaagtgaatgaaaaaggtatggaatatttcaaccaagtactagagaacaaaaagacaccaaaagaagcgcttggtgagtgggcagctaaaggaaacgagatgctggagaaattgaaaaaggatcctaaagctacgtttcaatgagaactgatgaagtagtcatatcataagtttaggatagccgctgaagattttaatctttggcggctatttttatgaaaatggggtattctacaaaaagcaggaataaatgacgactccggaaaggacgagcggtatgcactgggtatatttcagcaagttgtatgcaaccaaatttcaggcaggatgtctggccaaacgtatggagcaggatgggtggatttacggtcataatgaaccagcggaagtggaagtttatcgatcacgtaaaggacgttacggtgtacgttttattccctgacattaccccttgacttattgggatagaatggtgtatattaattaagtcgctgttttaatatttcttactgacgcggggtggagcagcccggtagctcgtcgggctcataacccgaaggccgcaggttcaaatcctgcccccgcaatttagtttcacttggatgattcacagccatcatctgcacgttatacattatgtctagggcccttagctcagttggttagagcggtcggctcataaccgattggtcacaggttcgagtcctgtagggcccatattcttaaaacccttgcctagcaagggtttttttctgtctacatgtaagctttggaggaaaaagtatcttgttaatggtgtctttctagtatgccctttttttcgaatcacgatgtatgtccatgccatatctcaaatctcgcatatactaccttatcccaacccataggaggtagatttcatgagtcaatttcttgatgcaagaacatctcagaatgcgagtttggctaactctattgcaataccaatcctggttattaatacaccacaattattcggtcagattggtctgcaaacagcaggagcaggggcaaacccacgggtacaattcaaaggaacggtgtctgtgcaacttcctttggcactcgttggtgtaaccgttacaattgttagggggactttggctacggaccctgtaatctattccgcaacgtctacgtttagcttgagtgtccttgcacctcagattattacgttctctgcagatgacttcaacccgcctatcacacctcaattgacgtacactgcatttatcagttccaacttgctcggtacgatccgtgtaggccctgagaactttgatggagctgtgtattccgactaatgttgagcgtccttgcctaagtaaactagatcaatagtcttcttaattgaaaggcctcaaggacctgccctcaaaagcaggtttttttcctgttgaaggggaaaactgaacttcatcgagtaggtagggttctatgatataatgcattacagagattgaatggtattggacatagaataatacgtaaacatctgagaaacgtatgaaattagtgatagaaagcaggtttccgtttaatgacgttaaatgaaagtcaacgttttcgttacagtgaagctccggtctgggattggcagagagcttattatgaacagaaggggctacaagcttggacagagaaccaagttcctcaatatattacgagtaatccgatgattgccacggcgtatgcagagatgatttttggctttcttcaggacctctcgaacaaaggaaagatcagcgagaccgtaaccattcttgaacttggagcgggtgtagggcgtttggcacatcaagttctcctgaaactgattgagttaaaagaatttgctggaatacagttaccgcctttcagatatgtgatgacggatctggttgcagagaatgtgctgggatggaaagagcatccatccatgcaatcctttattgaacaaggtatagtggattttgcacgttttgacgctgtagcggatacggaattgaatctggtcgttgcaggcacggttattcagcccggtgatctgaaacaaccgttgttgttgattgctaattacttttttgacagtattccacaggaattaatctacattggggatggcgagatctatgagtgtgatctgcttgtacagtctccggatcgtcgtcttgatcttgagcctgctgagatgctgaagaacatgacgctgagttatgagtatcgtcgagcgcccgaatacagtgcggataactatccgtatcaggagcttatcacattgtacaaagaggaactggaggattcgcacattctgttccctgcaatcgggttgtcctgtctcgaacggttgaacaagctttcacagtcaggttatgtgttgattactgctgataaaggggatcatcgtctggataactggaagttcgcagagccacctgaatttgttctgcacgggagtttttccctaacggctaactaccatgcgattcaatatgttcttgaacaacagggcgctcatactcgattcacaacacatcattataaagatctgaatgttgggtgcatgttgatggttgaagaacccattagttatgtgaacacacgtctggcctaccatcgatttgttgaacgttttggaccggatgactttttcagcatgaaacaatgggtagactctcgaatagagagtatggagttaaagcatattttgccgttttggcgtctgggtggatatgatgcggagttcttgattcacagtgctactcacatttctagtcttcttcctgatgcaagtgatgaggaaatgctcgatattcagtctggtattcatacgatgtggtcgtcctactatgtaatggagcaacaaggaggtctcgcatttctggcagggcagcttttatatgagatgtatatgtatgaggatgcaaaacggtttctggagatatcattggttgcagatccgagtaaccataatccagccgtcttatacgatttggctgtgtgctgttacgaacttgaactggaagaagaaaccctgtcatatacgcataaagtattggctctggaacctgatcatgaagaggcagcagcgttgctccagagttttgaattgatctgaacggaacaattttagtatgtctcctgtatgtaaaatgttggttatggttgtatataaaattgaaacttatttggggtgtaatcgtattaatgggatattcaaccaatcatctatttcaacagcaaaggagacaaaaacatgaaaaaatccttatccgttgcattatatccattaatgtgggttgttggtgcatttagcgttctgtctgttaatgcaaacagtgctgcaggcagcgccctctttgtgaaagatatcgctacagatcgaagctatgatgggcaggctatatatgatagtattgaacgtagaaatgcctaactacatatcattcaactgtaaaggtaattgtgtcgtcgagcaataacatgagaaacaattactcttgaagtgatgtacgatgagcaggagttctgtccgtacaacctttaagccggtttcgtaccttattcaggtatgaaccggcttttatttatgaatgggggataccagatgaagattattattggacaaccgaggctggaacagcatttgctgcagcttgaagccgaactcaagcaacatcctgatgcagatgtagtattctttcctgaaggttatctgaaccagaatgtcgaagacgcttgccgcctggcggctgaatatggaaccatgattgtatcaggtcatcgcaggttggacgaacgcccgaaggaccgatcgatcatcatcagtacggctggagagattgtattggagaaagctaaatatgcacctgctgaaattgttgaggaacagggttgggtaataagcactttgttgtgtgatgagctggtcctgcaaggattttgcaatgagaatatagggaatttggacattgtgatgcattctattggtgtgggcatgttcagtgaagagcagtacagtgagtgggtcgaagaggctcggcagatcgccttgaagcatcaatgtattgtcatggggacaagccatgcggatggttcgtaccgtgatagcgagatatccattccaatcgcgtattgtataacacctgatggagaggttgttctggcatcccgaagtgatacacgtactcgtacaatccttctggacagaggaaatccagaccctttacctcaggagtcacaagaaaaacaactgaaaatttccatagccccatccggttaaatcaacgggtatgaatcccggatgaatgggctgttgaacttgccgattcgcccggtcacttgcacggaatacgcatatgttatggcataccttgaaattcaaaggaggccaatcaaatgagtcaagttggatacggttgttgtaatgctggtggcggatggacttctacaagtgcaattcttgtgctttttatcctgctcgtgatcatcacaaaatctttctggctgtaagtcacgtatagaaacgtgcaaacagtgggctccgctgagacttcagcggggcttttcctgtttataagaagcaacatatgtcatccatgacatttgacaactgaaaacaatgtgcttaaaatcacataagagactattaacagagattgaagggatagcaatgccgtttattcgctttaaaggattcacaggtcctcaactagaggaagttgtaccccaaattacagagcagatggccctaattactcatattccaagggagagaatgaaggcagagcgtcatgatgtacaagcgctaacaccttctccggcttctatagagattctgatgtttcaacgtgaccaggagattcataatcggattgcatcgtcggtgcaagctattttggaagaagcatatatgccggatgtgcacattttcttcaatatattgtcacctactttgtattataaaaaaggcaaaccgctgacagattatcgattggattgagattatgagggacgagcagaatgttgctcgtctcttttgatttacatatttttcgtatgtttagcaatgggatggtttctgtgaactctgctcaacgataatgagcatatcgcagatacaataaacaaggctccaccgataaggtatacccaccgaacgcccagttgatcggcgactagaccaaagataactatggatacactcataaccgtggatatcaggacgccatgggtggcgtataccttggttagggattcgacaggtacactgttctgaagcgctgtctgctgagccacatcacgaatctgatgaactggacctatgagtatacataacaccagagcgagccacggcaggttgtttagaccataaacgacggtcagcaggctgcagagaagagaacccatggtcatactagcgattagatgcttctgaatacgtttggctagtgcaagagccagaatacctccaagcatggttccagcagcgtaactcgagttcatgagtccccaccaaccttctcctcgtcccagagcttcttttgcaaaggccagcgtaacagctccgatccagatggaacccgcaagtgcttgggcaatgtccataagcgtaatcagccgtaatgatggattcttccaaagtatactccaaccttccctcaatacattccgcgatacagcagatttgtgaggttgttctacattccgtgtgagcgagcccatggcaatcatgaagatcagaacggcccaggacaggcttgtagctgcccagaaggtctgtgacgccccccagttcatcacggcgaatcccgtcatggcgtaaccgacaatggttacagtctgattggagaaagatagcaggctatttgcttttataaggtcttcaccttgaaccaatcgtggcgttaaagtcttcagtaacggagtttcccatccgtccaagaaggatagtatgatcactccgagcaatagaagcggaagttgtgaaatcaagtgattcaacgaaatggctatacaggtcatgatgaatgttttggctatggaaatgctgatcaatagtctggagaatgggaaacggttcacaagtaatggcaaagtgagacttgctactatgcgtgcaatgatctgaatcagtggaaacattgcagcagagagtaccgatccagtgagaccgtatatatacgtagtaatgaccatgatgtatatgacattaataagcgagagcagcgtcttggcggcccagtacggataaaatgcgatgttcatgccaatgatgtcctttccgaaacgatatatctatattacgggcattgtcatcattgcaccacaaacaaagttatcattttcccgtcatttcatcacaaaaaaactgcccaacagggcagtcatcttctaatgcctatagttcatgccatagcaagtgtgaaggcgataagcaacatcagcaggctggtcgttctgaccatagtcatataaggcctgctgggttcggcttcgccccgggaaatccagccatagcgcagataccagccgaattttgggaaacagagattaatgatacagagtaccatgaatataaaaaagagggttctcatacccatcttcctttctcacttacataacggatcttattttaacgtttgcgtctggtaaaaaagactacaatcaaaataataatgatgataattaacagaaatttcatgtatgttcctcctggtgagtagttaggttattgtggaatgttagttatcaactattacccataaaccacatgacttgaataactgtgttacaattaaaatatattgattttatatcaacacattccgtttggttagttttctctccttataatgtacgattgcagaatatataaacattaatgtgtgtgagatgaaggaggaaggcatgagccaacataatcaactctcattacaatgggaatttatcatctcgaaagtgaaatcctccgtgacggtggtcgatgctaccttgcctgagcttccgctcatgtatgtaaacgaacactttacccaactgacaggatacacgtatgaagagtctgtcggacacaattgccgatttttgcaagggcaggatacagatcccgaaacggtaacgcagattcgtgatgcaataaagaaacaacaatccattaagattgatattttaaattatacaaaaagtggtcagaagttctggaacgaactgaatattgatccgatctttaatgaatccggagagtgtttatattttgtaggcattcaatacgatatttcagaacggaagtatgctgaacagcagttgaagtttgcaacttccatggctgagatgaacagcagagggcaattggaattcatcggcaagctgaatcacgagcttcgtaccccgcttaacggcattatgggcatgatcgaacttgccagtatgggtgaaactacggatgagcagaaagaatatctggagcttgcacgtcaatcaggtgaggcgctactgaacatcattaacaacagcctggatatggcgaaactgggcagaggcaaaatggatgttgaaaacattgaatttcagccgttgaagctgatccaacagattgtgaagacacatgagcctgcggcacggaataaacaaattcgtttgctctgtcatgctgatctgaatgttcctgatgtgcttatcggtgatccgctaaggcttcggcaggtactggataatttgctgagtaatgcgatcaagttcactgaacaaggtgaagtgcagttacaggtggatgtgaggcaacaactgatggataccgttgtattggtattctctgtacgtgatacgggaattggcattcctcagcatcagatcgaacaattgtttgatgcatttacccagaccgacatctcccatgcgcgccgatttggcggaagtggtcttggtctgaccatctgcaaagaactgctggaactgatgaatggtcagatttcggtggagagtacagaagggaaaggcacacagtttgaggtgacactgcccttgctgcgccaacaggccattcccaatgtaggataatcaatcaagcaggacagccgggcggtctcggctgtttttttattgtattggattgttttacgaacgggcgttctgttataatgcaagtgttgaatgggggagacacagcatgagtaagagacgcacaagaagaaagcgtaaaggcaaacaaggtttcaaaaagcaggtactgacgctggtagcaatgctgctggtagccctctacgcctgggctgggggagaatggcccgaggagatacctaatccattcggtgggactaataagagtgtagaccataccattacgttcccttcagagcgttatcccgaaacagccaaacatattaaagctgctatcaaggcagggcattcggatgtatgcaccattaatcgtaatggagcggaaggcaatcgggatctatcacttaagggtgttccggtcaaaaaaggtaaggatcgtgacgagtggcccatggcgatgtgtgctgagggaggaacaggtgcagatatccagtacattaccccgaaggataatcgtggtgcaggttcatgggtagggaatcagttaagtacatatccggatggaacacgagtgaagtttgtagtgaagtaacaacaggatatggttgggcagaaataaggattgtaaggcctttgttgtgaggtcagtggcagcgtggtacaggataagtagaagagaaaaaccagacgtgcatgcgtctggttttttggtgtaaagtgctggcataaatagatctagttaacgtatctatacgggaactggagtttctaggattacagagccgactaaacgagttgcattccgcttaaatgatgagaccggatgcttaacagacgcgtaacatgttccacctcatcaaacggtatccacagactgccgtgaaccgtacgtaaggagagaatggatgaatcagcggtgcgctcgggaaaaccggttaccgtctgaccgcttgtattacgaaccgtgatctgttgtttgcgccgtatggcaatttctacctcttttttcataagtcattgctcctgattatgagatattaaatccatatgtcaatgttttcaatggttaatttgtcttctttatctagtctatcagaactaggtatagatttccagaagagaaatcaacaatcttctaggtgatttgtcttagctgtggatgatccgtttttgaatggggattacggggttatattagggtaaaaggaggggaacggaatgacacaattgattattgggctggcccgtaccgagaacgaggctataattatgctgaataaggtcaaagaggaaggcatcaaggataaatatttgggagcggtggcgaaggaacagcttaatctggagctggtgagcgaaaagacggggctgcccaaacctttgaagggtgccggaacagatggtgcctttggcgctctgaaaggcatattggctggtctggggaagcgaatggatcagacgatgtcgattggaaatgcagtccgtagactcgctggtaatgagattgggagtgagaccgatgatttggtgcttacactgactgaagcggggatctcggaggaggatgcgcggtattacgaagattggctgttaaaggaccatatcttggttatcgtggaatgcagtgaggaagaagcggctcgtgttcgacctattttacttttttagtttaatttaaggctgattttaggtttctttaatgttggggaggtattcttatctcacacctcccttaatatagattggtttaccggaagtccgggaccgcaactcggactttctaggcactgtgagctgacgcttgcagtgcctgtttcatttttttattatttttaataaaagtgttgcaaagttaattagttcatggtaagatatttcttgtcgccaagaaatacataatcctgccggggtggcggaattggcagacgcacaggacttaaaatcctgcggtaggtgactaccgtaccggttcgatcccggtcctcggcatcttaaaaagaaagatcgtatgacgcttgttaaccaagctgcatgcgatctttttttgtgttctttaatatcaatgtcacttcattgcagaccacatcaccatgcagctcataaacataaaccctgcataatacatatcagaaggtacatttatctgacttttatgaagagacggaacaatggtgtatactatccgtaggcatatattacctttaccttgctgaacgatataggttcaactacacatttacacgataacggagaggacagatgttgttctgtcatcggagtgcccgtgtaaataaacatatttgaacttatgtagagtcacaaaaccaataaaacaatcttatggacggaggactcaagtttatgttgaaacagcttaagccatacaaggtgttacaggagcgcagaatcgaagaactgaaatcggatgcgtatctgttggaacatcagaaatctggagccaaaattgtacttttgtccaatcaggacgacaacaaagtattcagtatcggtttccgtacacctccggaagatgatacaggggtagcccatattctcgaacactccgtgctctgtgggtccaagaaatttccggccaaggattcttttgttgagttgctgaaaggttcattgaatacattccttaacgccatgacgtatcccgataagacgatctacccgatcgcaagtcgtaatgatcatgacttccataatctgatggatatatatctggatgcggtattgaatacaaatatttatgaaaatgaaaagatatttctacaagagggctggaactacaacctgacctctgcagatgatgagttaacttacaacggagttgtatataacgagatgaagggtgccttttcttcaccggaacgaatggtgcgtagagaagtgctgaactcccttttcccggataccacatactcctccgagtctggtggattcccggaagctattctggatctaacgtatcaggggctgctggatttccacacgagatactaccatccttccaacagttacatctatctctacggggatatggatatggaagagaagctgcaatggctggatgaaaactatctgagtgcatatgatcgaatcgagattgattcggccattcaacttcaacctgcttttgcagaacgggtagacacagttaagacttactctgcgggaagtacggaatcggaagtggataacagcttcttgacctacaatgcggtgatcggcacaagtctggacaaggaactgaacatttccttccaaattttgttatacgcactgttgaacgctccgggagcggtattgaaacaggcgttgctggataagggcattgcgaaggacgtctacggttcctatgatgacagtctgtatcagcctgtattcactgtgggactgaagaagagcaatctgtctagcaaagaggatttcctgggaacggtcaaagaagtgcttgagcgtgtggtaaaagaaggttttgatccaaaagcgctgcttgctggaattaactcgtatgagttcaaccacagggaagcggactatggaagaatgccgaaaggcctgatctacggattctcctccctgcaaagctggttgtacgatgaagaagcacctttcactcatttggaagccaatgacgtatttgctgaactgcggacaaaaatgaacgaaggttacttcgagcaactgattgagaaatatattttgcaaaacacacatacttcctttgtggcgcttaccccggataaggggctgaactcacgcaaagaagaagcgttgaaagaacgtctgaaaaccattcaagccggtcttagcgaggaagaagttcacacgttgattcagaaaacggaggcactcgctgagtatcagaatacaccttcaaccaaagagcaacagcaggtcattccgacgttatcgattgaagatattgaaccaaaggcctctacgttgcatcaaacggcgaaccaggtcgatggcacaaccattctgcatcataacctctacaccaacggaattggttatctgagactgttgtttgatatcaaagaagtgccacgtcatctcctgccgtatgcagggttgctgaaaaatgtactgggttacgtggatactcaaaactactcgttcaatgaactgtccaatgaaatccatatccattcgggtggtattcatagcgggataggatcttatgctaacgcgcataagcacaatgaattcaaggctacctatgagttcaacgcaaaagtgttgtatgacaagcttggatttgcctttgatatgatcaaagaaatcgtgttcacgtcccaatttgataattcgaagcggttatatgagatcatctctcagatgaaaggtaatctgcaacgtaatctgatcaatagcggacattcggcgggaattggccggtcttcgtccaaacattcagcggttgcggatttcagagaagctgtaagtggcattgccttttaccagtggcttgaggatcttcaagcgaactttgaggctagaaaagaagagttatcttccagtctgcaagagttgacggggtatattttcagaccggagaacttgcttgttagttacaccgccgatgagcagggatatgaaggactggagcaacaggtatccgatctgaaagcaaagctgttcacacatgaggttgccaaggaagagtttacgttcacaccggctactcataaggaaggattccgttctccttcagaggtgcagtacgtggtgcaaacgggcaattatatcgacaaaggatatcaatacaccggctcactacgggtcttgcagggaatcctgtctctggattacttgtggacgaatatccgggccaaaggcggagcttatggctgcatgtcaggcttcagacggaacggagacagctacgttgcatcgtatcgtgatccgaatcttgataaaacgtacaaagtatatgaagaaatacctcagtatttgaacgatttccgggcagacgagcgggagatgacgcgttatatcattggtgcgattcaggatctcgatacgccgagaacgccttatggcgaaggagcattctcgctggagtgttatctgtcgaatgtgactgaagcggatctgcaacaggaacgtgacgaagtattaagcacgaaggaaagcgacattatcggttttgctgagcttttatcggccatacttgagcagcaacagcgctgcgtgatcggtaatgagaacaagattgaggaacagaaacaaatgtttgacgaaacgctggatttaattaaaaactaagcgttagtctcgtttattccacgatccaataagcgtcaaagcgaaaggcacttttatgagctggtttcaacagcttatagaagtgccttttctaatggggagggactgtctccatcccatatgagaatgtgtgacacactgcgttgttcaggtgacagcgagcatgttgtatattttcagggtccgcagatcttcctttgagatttttaattcattatataactcctgattctcgggcagcggggttctggagaataacattttgagcgcgataggcatgaaaggtctgaaggagacaccagccatcagtccccactttttctccgattcctgaaaagacgccagaatattaatgtatagattctccagcggcgtggcctgatttttcaaaattagcgtggtgagtgtatcataatgctcggtgtggccccaatacatattctcgcactcctggtagttctcaaaatccttcacattcatatacatcacggtgcgataacggttggcatccgattgagccatcatgtcaatgacacaacgaatgagactgttgttacgcccgtcatagaagtaggaatagaaacgggtggagttcttgaaaaagctggacgggaccgcattcatcaggggagatgcatgccttggttcttggtacaagagttgctccacctgaatgttgagcgcgtttgcaatatgatgtaacgtgaccagatcaagtgtaatatctccgctctcatatttggacagcgtacccttgcttttgaagatctgatccgcaagctgttgaatggtcagtccccgccacttccgaaagtttcgtatttttttgccaacttcctgattgatattgttcataaccgcttctccttatgcaatgtttcttgagagtacgtgaaaatgatgaaagtcattcataaaaatgatgttatatgagaaatatatcactttttcacggaaatacctattttggagaaacaataaacttcatttgtttcgtcagaatagattgtattacatttgatgcaattcctgcgtcatgaaataatagatgtaatacgacatgaaacgacaatgaaaaagtaaagcagatagaggagcagaagctatgaaatataactttgatgagattatagaccgtacaggaacaaatgcgatgaatacggatggtttccgtcaatatatttttaacgccactgaagacatgacttttccattcaaagatgaagaatttattcgcatgtggattgcagatatggaatttgccacacctcccgagattctggatgcagttaaggagcgtctagaccgtagaattatgggttactctcaggtatttgatccggcatattacgaagctgtttcgaattggatgaagagatactatgactggtccttcccgaaggagcatttggagacctcaaacgggatcatccccgctttgtatgaactggtggaatatatctgtcaatcggatgagaaagtactgatcgtgaccccgtcttatggtttcttcaagtcagctgcggagcataacaatcttgaactggtatgttcggatatgctcaatgagcaggggcgttactcgattgattttgatgattttgaagccaaggccaaggatgagaaggtaagggtatgtattttctgtaacccccataatccgtctggacgtgtctggacaacggaagagttacaacgtgtgggtgagatctgcctgcggaacaacgtatgggtcatttcggatgagattcactgtgatctgctgcggacgggtaagagacatacgccacttgcaaagctgttcccggatacggatcgaatcattacatgtatgtccccgagcaaaacattcaacatggctggtctgatgttctctaatgtcatcattccgaacaaagcacttcgagacatctggcagtcacgccattatggtttcaaaaacccactgagcattgctgccactcaagcggcatacgaaacgggtgatgaatggctaaaacaattaaaagggtatctagacgccaatttctcctgcgtagaacagtatgtgaagcagcatctgtcacgggctgtttttcacattccggaagcaacatatctggcttggattgatatctcggcatatgctcccaagaatgtaagtctacctttattcttcgcggagcaagcgggtgtgttgctggaagatggtcatatgtttgtagccaatggtgagggttgcattcggttgaatctggcttgtccccgttctgtccttcaggaagggttacgaagaatcagcagtgtgcttgtgaaagaagtcgaagaggtgcccgttcaggtataaagtcatcaagtcaccacgcaatagcgaggtgacttttttggatgagtatactgaatgtagagagaatacgatttattttgaggtgaacgtataccctgatgtgcaattctggtctgctgtctccggttatgttaaaatggtggatagtctatgagttgcatgacatgcggctctcagaaggaagagcccagtagttgggctgaacgaaactgcattcaccaggggaaaggagcctatacatatgtttggaaacgattgggacaaggtgcttcaggaagagacggaagccgaatattttaacaagattcgttacaccctcgccgccgagtacaaaacgcagacggtctttccgcccaaagaagacctgttctccgcactgaagctgactccatatcatcaggttaaggctgttattattggtcaggacccttatcacggagcgggacaggctcatggattaagcttttcggttagaccgggggtacgtgtacctccttctctgaaaaatatatataaggaacttcaggcagatctggacctgccgattccgaatcatggatctctggttcattgggcacagcagggagtcctgttattaaatgccgttctgacggttcgtgaaggtcagccgaattcccatcaggcattgggctggcagacgtttacggatgctgtcattcgtgcgctgaatgaacgttcagagccgatggtatatatgctgtggggcagtcatgcccagaagaaaggtgcttttattaacagggacaagcacctggtactggagtctacacatcccagtccgctggctgcgcatcgtggattcctcggcagtcgtcccttttccaaagccaatgatttcttgacctccaaaggtattgaaccgatcgattggaatatacctgaaaactagacagatggaggtgagaacattgcgacattggataggacgaaaagtagcggtatatcgtgcaacaggcatacgggagccattaaagggaacgctggtcgagtgggatgaagaagcagaatgtgtacgaatcggaccgaaacggattaaggtatcatttgacaatatcgcaatgatcagacctctccccgaagagagtcttcccttaaagaaagcacgttctgaagtgcacaaggttggatatgtgatgaaaaaggcgattcagttcgaaaatgcgatctatttcaagtcacaggttatgatctggcgccgggccaaaattgtagcattatccacgacgattctgcgtcatgacgaggatcaggttgaacttgcagatggtcgtgttcttcgtaaagacaagcatatgtttgtcgtacgttcacgccgtgggatacgttagttatacgaagatttaatattcatttcatgcaaagatcatatggatttaatgttcggtctgtatattagatagtaacaaccccttctaaattgatgtgtattgaaatgggagcccgaccggctgcaaacggtcgggttttttttgtccattggttctgttaacctgttgtacatacccataacattcatgttgtatactattaaaatagaaaattgaactaaacatttacacgagaacgtagagggcagaaataacctgaagaagcggagcgttcgcctttatcaacagattttcacctttgtaaaattgaattaaaaaatctggggataacagcgatcggaaggttgttctgtcatcgaagtggcaagtgtaaatattctttagttcaatctaaaaagattatgagaaggagtgaaacccaatgaaacgtatagctgtttttgcaggctccaatccgggaaatcaccccgattatacagagaaggctgttcaactgggcaaacagattgctgatagtggttatgcactggtctatggtggttcttgcatgggcttgatgggtgcagtagccgatgctgctcttgagcaagggggagaggtaatcggggttatgcctaccggattgttccggggagaggttgttcatggagggctcacacaactgattgaagtgggaaccatgcatgaacggaaggctacgatggctgaattatccgatgggttcattgcacttcccggaggcatgggtacatttgaagaactattcgaggtactgtgctgggcacagatcggtattcatcgtaagcctgttggcttattaaatgtcaacggatattatggaccgctgatgaagatggtagaacacagcgtacaggaaggattctccaacacctcccatctcagtctgtggagtctggaagctgatccggctgaactgatcaaacaaatgtcatcctatattcctgcagagctgactcagaagtggtcacaactcaacgggaaatgagtgcataagaagatgggcctgaccccactcgtttctcgggagaattttcgatctgcccaagcaagttgcgctatcggacatagtctatagtgtacttcgatgaagaggggagtgtcactgatgagcgaactcaaaggtacaggttacggatattgcggaggcttcggtggtggagcatggacatcaacaggtgcaattctggtattgttcattctgttggttattatctctcgcacattcattctgtaattcggtcagtatcccgggatgggaatcacgctgcagaggcagcgcccgaataaaaaaatgacctttccaaagagacgccggtataagccggcgtttcaggggaacggtttttttgacgtttccagcatgcgttaagtaattgaaaaagcaaaaacctgcccctgaataaggtcagaagcaggagagagcctcctgagccattagctgcgcaacaagcagcttacaccacaacagcagtttgatccggattacttaacgatttccaggcgatatatagcccgatggcggctgcaattaaggagagtattgctgcaacaatagccagctgatccagtgtgttgggtgaactggagttaagagaacgctgattagccgtcttgccggatttgtttttgatatggacagatgatctggaaagcctggaagccgactgtaactgggatgtgtgaggacgcgtaggtatcgattttttctttgaggtattcaatagtcaacctccttataacggagttcagtgcttccatcgttcatactatgttatgtcgattttcagattgagttcgcaaaaatgagtgaatccccagcccgttagatgttgggcccggtcgctagtattagcgaagcaggcaaccgattatacgttctgttaatacaggtctaacaaaccgtgtttatagtgatgatcatagagtgaagcttgaacacaggaggcgctggaatgaggaacatggagattattgcccatcgcggtgcatctgccgtatgcccggagaatacgatgagcgcttttgaacggagtctggagcttggagcaacaggcattgaaaccgatgtgcagatgacgagtgatggcagactggtactgattcatgatgagacgttaagccgaactggcggcgcagaaggctgggttaaggatacgacttacgatcaattgcgcacacgggatgcggggtcctggttccatgctgattttaccggggaacgtattccttctctggaggaattattcaagctggtacaggggaaaggaacactgcttaatctggaattgaaaaatggtattgtgagttataaagggatggaagagaaggtcatacaggcgatccgggattggaatctggagcaacaggttgtgctgtcgagcttcaatcatgcttcgctcgtgagatgtaaacgtcttgccccggagattcgtacagcacttctatatatggaaaagttatatcgtccctatgattatgccgccaaactcgaagctaccggccttcatccctacaagctggcagtcacacaagaagatgttgctgctgcactggcacatggcgttgttacctatccatttaccgtgaatgatcctgccgagatgcaggccatgattgatatgggtgtgcaagggatcattaccgatgttccggatgtcctagcatccttacttacggtacatacccgttaaatgagtctgtattttacatgttctacatatgcaatgataaggctgtgttcgagctttttggctcttgcgcagcctttttgcgtgtaaaattgtgtgcaaatcttcatatatgcaataaacatgtcctatttgtccattgccagagtccgtggattcacttacaatggtctatgggaatgagaatcaatatcattaaagttcggtacttatagagaggtgattgttatgtacataggtttgagcagctccactcataacgagggtgggcgcgtatgagttcacaagcttcaccagaaaaacataatccggattcacccacagcgaagatacacactcgtccgtgggcggccacacttattcttacagggggagttttgctactcgctctgggaatggcgttgtccatttcttttggcgctgctgatattaagcttagtgtagtctggaaggctatctttgatttcaatcctgagttgactccacatcagatcatatgggagattcgattaccacgtatccttggaggagcaatggtaggtgcatgtttcgctgtagctggtgcgatcatgcagggcatgactcgtaacccgctggccgattcaggtctgcttgggttaaatgcaggagctggatttgcacttgcagtttgttttgccttcttccctggcttgccatttatgtatatcatcatgtattccttccttggagcagggcttggtgtcctgttggtgtatggttttggtgcagcttccaaatcaggtcttacaccactacgccttgtgcttgcaggtgcggctgtatctgcgatgttgtcggcactcagtgaagggattgcattatatttcagaattggacaagatttggctttctggacagctggtggtgtagccggaacgaagtggtctcaacttgaggtcatgttcccctgggtactcgcggcactgatcgcaggtcttctcatctcccgttccattactctgcttagtctcggagaagatattgcggtgggcttagggcaacgtactgggctgatcaagctcataggcctgattgttgtactgattctcgcgggtacagctgtgtccgtggtgggtgcggtcggttttgttggactcattattccccatctcacgcggaagctggttggggtcgattatcgctggattattccatgttccgctgtgatgggcagtctgttgcttgtatttgcggatctggctgcacgtatgattaacccgccgtacgagacgccaattggcgctttggttgccctcatcggggtaccatttttcctgtatctggcgcgtaaagaaaggaggactctgtaacgatggaatcctcaacaatagttggagcagagcgcaagaagagaaccaagagtacgattgtcctcattgtgcttgccctattaattattacggcttttgtggtgagcatgaacacaggttttaccaagctttcgccgcttgaggtgttgcgaaccctgtttggtggaggtacggcgaaacaggaattgatcctgtttgaattccgtctgccacggattgtgatttcggtgctggtcggggccggacttgcgttatctggttgtattttgcagggagtatctcggaatgcgttggcagatccggggatcctcgggattaatgcaggtgctggtctggtcgttatgttatttgtttcctttttcccgacaacgacagcagcgccggtatttcttttgccaattctggctctgatcggttccggttttgctgcatttctgatctacattctctcttacaaaaaaggagagggcattatgcctactcgtatgttacttacggggatcggggtagcggcgggaatcagttctgccatgatcgtgcttacgttacggcttagtccggaaaagtatcaatttgtagctacctggatggcaggcagcatctggggttcgaactggaaatttgtaacggcattgctaccgtttctgatcattcttgtaccgcttgtcctgtataaggcgcgtgtactgaacgtgttgaatctgggggaccagactgcaagcggactcgggactccggttgagcgtgagcgactgattttgcttgcggctgctgtaggacttgccggctcatgtgtatctgtgagtggggggatcggttttgtaggtctgatcggaccgcatttggcacgtcgtctggtgggtccaaaacatcaattcctgttacccgcatcggcactgatcggttcattgcttgtgctggttgcagatacgctgggtcgtgtcatcctgcagccttcggagattcctgcggggatcctggttgccattattggtgcgccatacttcctgtacctcttaagcaagacgaaatagaacgtaatcatcattgtgtgattgcataaggaggacttcagtccatgcttcgccgtttctttgcctattataggccttacaaaaagctctttattcttgacttcagttgtgcgattttagtcgccctgctggagctggcatttccactggcggtcaaccgggtagtcgatgatctgctaccaggcggccgctgggactggattctatgggcgtgtctggcattgctgggcatctacttattgaattcatttctcaacttcgtggttacctattggggacacaagctaggcattaacattgagacggatatgcgtaaaagtctgttcaatcatgtgcagaagttatcgttccgtttcttcgataatacaaaaacaggacacctcgtgtcccgtatgactaacgatctgatggatatcggtgagattgcccatcatggtccggaggatgtatttatcgcggtcatgacgctaattggtgcattcagcatcatgatgagtattaacgggaatctggcggtgttaacctttatcatcgttccactgattatttatctgtcgctctactttggtagcaaaatgtccaaggcattcagccgaatgtttggagatattgcggacttcaacgctcgtgtagagaacaatatcacaggtatccgtgttgttcaggcttttgctaatgaagagcatgaaaaagcacaattcgctgtgaacaacggtcgtttccgtcagaccaaactaattgcatacaaaatcatggcctggaactcctctgtcagttatatgctgatgaagctggtatccctctttgtcctggtatgcggaacgtggtttgtcattcaaggcagtatgacctacggtcagttcattgcatttattatgttgtccaatgtgttcctgacaccgatccagaagatcaactcggttatcgagacgtatccaaaagggattgcaggcttcaaacgttatacggagctgcttgatatggaaccggatgtggaagatcgtccaggagccgttacggtatcccatttgcgtggagatatccgttatgagcaagtgacctttggttattccgatcaggagcctgtgctcaaaggtattgatctaaacgtacgtgcaggtgaaaccgtagcgcttgtcggtccatcgggggcaggtaaaacaacgctatgcagtctgctgccacggttctatgatgtgctggaaggtcgcatcacgatcgatgggcaggagatacaggatatgacactggactccttgcgtagccatatcggaattgtacaacaggacgtgttcctcttcgatggaagcattcgggagaacattgcctacggcaagctggatgcatccgaagaagaaatctggatggctgccagacgtgcccagatggaacctttgattcaatccatgccggaagggctggatacgttaattggtgaacgcggtgtgaagctgtccgggggacagaaacagcgcttatcaattgcccgtatgttcctgaaaaacccaccaattctgatcctcgacgaagccacatccgctctggatacagaaacggaagcggcgattcagcaatcccttgctgagctgtccgagggccggaccacactggttattgctcaccgattggctacgatcaaaaatgcagaccgcattattgtcgttgctgaacaaggcattacggagcagggacgtcatgaagaactgcttgcggcaggtggagtatatagccgtctgcactatgcgcagtttggtgcgtaacccgttcgatgtggatgtaacaatgtaaatacgagaagtaacgccatcgttcttgacttggaaggagtcaggacgttggcgtttttttctttttcataatcaattgtgggtcaggggtactgtgctcatatctgcctgtgatcatggatgtggaaacgggtaatatagtaaagagaacacttaacgtgtaagatatgttcatcatcttgcaagatataggaggtacacgatatgcagttgaacgatatgctgaaaattcttataacctgtctattatttattctgatttggtggctactgactaaagggattcgcaaaatttccagaagtcgtgcggggtccggtttccaacgctggggtggatggtccattggacttttcgttgttggcgccgtgccactcggtttttcgctatacacagagatctttgataagcgcctggatgccaacatcgggttggggcttgccatgttttttgtatgggcttattgtgtgatcttgttgtgtgcggcgttggtggtatggggaaggtacgtgtacaaaagggatatgaagaagtgaatatttgggttgatcgtgttgagcccgtcagaaagttaagggtgagctgacagctgttgatctccattggcacatgggctttacactattagttaatgacgttcctatggattttcgaggtccttcgatgccttcattagccaaaagaattgcaaaaagtgatttgattgatgcaaatatcattggttctgcagctaaagccattggagcgatagaggaacctacaaagaagttctacaagagttgaaattactctggcatgtcttggtgagatatggaaagccaatggaaaagtgaaatagtactctaacgaccttgagcgcctagccgttcaaggttgttttttatcattcaaacggattacagactatacatttatctatgaatctgctgtcacaaaaacgaacgtatgttttataattaaattgactttttgtcctgacaataatatattgttgtcaggacaaaaaaagaggtgaagcaatgtccgccaaaaagatggggcggcctaaatctgacaaacccaaaagcagaacgattgagatacgtgttgacgaggaaattatgaacaagctcgatatttcggctgagaagctgaatacgaatcgatcagacatcgttcgcaaagggattgagaagatttacgacgaactccaaaagtaaaaaaggaagcagcgctagtcccgcgaagaacacgctgcttcctatcacacaatcacttgaatgagcgactgcataaatatcctaccatgtgcagaacgttcattcaagtgaagtgcgaattgatatacaggaggatgcacatgaattcgatattagaagcattatataatggacgacttcgaccggatgagatgatgatgcctacacatcctgaataccaagcgttggggcggcagattgcagctctgacagagcaatggaagaatcgattgagcgaggaagaattccgtgagcttgaacagttatttgacttgtgtggcagatgtgagggcatgcatacggaagcagcgtttgcacaaggttttcgtctgggtgccaacatgttaattgaagtcatgagtcagcgtgaggaatcggtgttggagtttaactaagtttaacgatgtgagcagaggtccggtttacttttacagctaaattctcagaaaatgacggcatacaaaatacttattttgcaccataaaatggtatcaaaaattgagtataacaaagccctccaatcctctctgcattcagcagcagggttcgagggcttcacttaaatatagagttaaaaaatctatatatagggaaagaacctgttaaacaaattgttccttaatccgcaatattccctgccatcttcagacgacgtgcaatttccttgaagtcttcttgcgatatgcccggtgcaaattcttcctcgaccgcaggagcttctggaatcgggaatccttcaggtatcccttggatgacttcaagaggttgtccatcttcggggtgagttcctttccagatctgaccgatcgtattgaaatctttatcactataggtgtacagcttggtgtgtacccctttttcttcatatttgcgagcctcgttgaaggctttgttgttcagtgaaggaataggaaccagcttagtcacatttacgccagttgcaatctcaagtgcttttgcatatgccacgacatgcacaccgccacgtaccagcaggaaaccaaccacttcccgggctgccgggtgatccgtcatctcatatactttcatcttatgggtacgagcgccacattctaggaagaagttatgcagcagatcctcgaccagattgccgctgttgaagacgtttgctcccgtccatggattacccatagagtcaaaaggcattgcgccttgtgcacctgccaggtagtgatacgacagacgagcatcttttacggaacctagtggtgtatcgtcgggttctttgtactcggttgaacctctgaggcacttgttaataccatgagacacgagctcaacatgacccaattcttcggccgtaatactcatgacgaggtcatagaagggcttcagcttttctttggatcgaaaattaaatgattgatagaggtagttgttcaacgttgacatttctccgaatttgccgccgagtaattcttgtatagctgccgcagcattcggatctggcttctcgacattgggaatctcaatcaggatttcatccaagcgtttgaacattcgggtgtaacctcctcttattggtattgcagatcgtgaagtcactctgtcatggcctattacacgtctaatgggttttttaaacaaaaaatcaaccaaatgggacttaagcatcgcataacgcatgcctcaactcttctcccatttgttatttccaatacggtcaaatttatgtataatcaaacattcaaacgagtcttcacgtacaagagaagagagtcatgaatccataaaggagtaagagatgaacaagctttggatacaaatagttgggattgtgatgtttctaatgattcaaatgtacataagcggcgagcctgccacagcatatgacgttacgaacgaggttcaggtggatgaacaaacgaggcaaaggcttgaaaagaaatacgggttggaacgtcctgaggagccgaagacacaacaacactttttctcaggtgactggggaatgagtttccggacggagcctcctgattcgtttgaccgacttgttcatgtggttcctttttccctacggccactggcctggatctttcgtttattcgtgtaaaatgaaacccggacgggcaatataacagaaacatattgtcccaaggagtgagtgaaatgagaatgctcatcgttaccgtcatgtcggtagttctgagtttagccggaattacatcaggcacaggcgccgccatccctgattatgcgaagtggggaattattgcggtcaaagaaacacagaccaagtataatgtggatattttggactataagcatatcggtcgcacctctctaacagcagatcaatcacgggaacagttcaagctatgggttcgtgcgaaagacggcaaacaattcgcagtctatgtaaatgttgattttaatccatctacacagcagttgaagaaagtacaattttccgaatcggatcgacactgatccgttatgaaccagactgccttaatcattaaggtgaaagtctggttttttttattttacaaaatcctttttttactattgaataaagaacttatgttcgcatataatatgaaatacaaacaaacgttcttatcggagggatgattatgctagggaaatatattggccagatggtggagcttgtctacatggatcgtgcagggcagattacgcaacgacagattcgaattaacagtgtacgtggcgggatgattagagcatcagcgggaaaagaaggttcgccccgaacatttctggagcaaggtattctggcatggcgtcctgttaccgatctgaatggggaggtaaagtatgctgaacgactttgaacgcaagattttgcgtattatggtgaactatgcaggacaacggcgcaggctgccgcgtatggatgaactggagaacaagacgggacgaagcagagcatacattcatgagtcactgctggagctggaacgaaccgggcacatcgcgtgggagaatcggtctactctcgaagggatacagattttgcaggcatgggaacaggtacaacagccgattcgcaaaagccaaccttccggtgattccgtaaaatattttacggactattaattctaataagaaaacgccaacccgggtaaccggatcggcgcttattgtgtcacatgtacgacatgtgcatctattttagaaatggggaagttggtccaggttgttggttgggtcaccgtcggcatctccgcgaatgtacatttcgccatccttgcctttaaatacattcacaccggcaatagcgccagcttttacttctgcaagtgcctgctgataatccagtacacgtcctgctgaagtctgaaaagctgtcaggtcaccgtcgccatttttctgtacggctgtgaaactctcgcgtgttgtttgatccatgatgtcacactctccttatatgacgagataggaatctgcttacctgattagcctatccgaattcatcggaagtatgcaccatatgctgataagacctgccaacgtcgaggttttacaagctctttctcatacgaacatgcagaatatctgcatcataaaaaggttcttccgaaatcacgtcataacccattttttcatagaatttctgtgcctgacactgcgcatccagtacagaataggataagccgagttcacgggccagctcctccatcgcgagcagaagcacacgtccataaccgaatgaacgatgagactcaagcaccgcgatccgctgcattttggccgtatccttgctgtaatagatcagacgtcctgtggctacagcttggccatccgtacttaacaatacatgatgcacatctggactgatgacatcatattgatcaatctcaatctcggcaggcacctgttgctcgatcacaaaaacgtgatggcgaattcccaaggcttgctccagttgttcttctgtcgatacataactaatctcagctgccaattccattccttctttctgctcttgcgcgacatatcagactgaattatacaaaaaaatgtttttcctgtatagtgaagtctggaacatattgggagaggagggggtagtgatgggcatgacaggcatcatggtaattacattgctaatgtcggcgggaatgattactctgttgtatttcgttacgaagaaagcatactcacgcaagtgggatgaagacgagtaattcatctgttaaccttcacggcaagacttcactgcttcctcgcggagaatatacatcttgaattacagatttggagtatacgtccagccaaacgggcagagattcaccattttcattgggctgttttaattgttggaattgtaccgtatgttcatccttctccaagctgcaaccagtaacgattgtaatgagaatcataagcccagcaaagagaaagaagcatttggtaaatgtatgtttattggattttgaccgttttgttatgtttctcatagggaattcacctcgttgtagaaatggtaatctttcctttattgtgcaccatttcgggtgaattataaccaaataaatcattgacaatgaacacggttacttgatatgatactgttacttgattgggaaacaattatatatcatgatctgttagctcagctaagtttagtagtacggacacgatggatacatcttaattattacagggcgatagctcagcgggagagcattatcttgacagggtaagggtcgtgggttcgatccccactcgtcctatatgaaaaattaaaggcaacttcttttgagagttatatctcaagaggagttgttttttttatataataatatggctacctccaataatatgtgtaggtggtttttgttgataataaatatacttaatggtacaatttggctaaaattagcagtgaaagtagttactactatcgataaaaataatacagaaaaaagatatggtggttgatcgaatgggacaaataaagcgtgttgcagcactatatcgagtgtccacaaaaggacagatggacgggaacgatattccaatgcaacaacgagcatgcaggaagatggtagagaaacaagagggatggaagctagttaaggaatataccgaaaaagggatatcaggttttaaagtacctgcctcgaagcgtgatgttatccaaaaggctaaagaggatgcagagaatggtttattcgatgtcttgttggtatttatgtttgataggcttggaagaaaagaggatgagactccctttgtacttgagtggtttgtaaacaaaggtgttgaaatgtggtctgtaatagaaggtcagcaaaaaattgaagcatacaccgatcggatggtcaactacttaagattctggcagtcaagcgatgaaagtaggaagacctctgaccgtgtcaacgaaaaacatatacagatggtcgaagatggtatttttaggggaggaggtattccctatgggtataaaagtgttgattccggtaatgtaaataaaaaaggaaaagcactgcaaaaactgtgcaagcaagaagaagagtcaaagatcgtacaagaaatattccgactagtgcttgaagaaggttacggacaactaagaatagctaaacttctaaacgaaaaaaatgttccgacaagaaaagcaaaacaatggggtgctcctactgtaaacgttatacttaagaatccaatttacaaaggagtgatgagatacagaaaagaaaaaggggacgatatattttcaaaaccaattcctgaattaatgatagtttcagaagaggattggaatagtgtacaggatataagggacaaaaagaaccctaagaatccaaaaagaaatgaaaattccattcccatgagcactaagggaagtttacttttaactggaatagccagatgtggttgttgtaattctagattgactacgactacatttgtaaataaatacaaagcagctaatggagaaatagttaaatacaatcagaataaaagttatcgttgtagtggaaaattgcaaggaaagacggattgtaacggacaggcaacattttcttcaaagaaggtagagagacaagtcttagaaagagtggatgtatacttaagtcaactcagaacatagatttccattcagaaattgaatcaataaaaaagaaagtttctaatgaagaagaggaaaaaattaaaacaatgcaaaatttactggaagggcactatgaggagcttgtggcattaaacgctgaggttccaaaagctataatgggtaagagcgcattcaagccagaaatgctcaatggtcttatcgagaaaaaagaaaacgaaattgagaaaactattgaagatattaagggaattgagcaattgttatcctccaaaaaaatggagatatctgagatggagactctaaaagattatctcccagtttggcgggatgtatttacaaatgcttctacagaaaagaagaaaatgatgttaagcacattgttagaggtggtctacattagcaaagaaaaaatattggttgaaattaagggtggaataaaagaattactcgatcatctatacagagagagtaaggataccaagagcttacttatttgacagggtaggggtcagtggttcgagcccactacagatcatacacgagaagccttacattgtaaggcttcttttcttttttacatacaaacataaatacgatttgagatagcttcctttcctttcctctttttaaacaaaacttaaataaaacataaattcagcgtaaggttcgtcttctatacttggttctgatgtcaatatagaacagaagagggagagaacttatgaattattcaagtccatttacatcaaagctagccagagtagggatcgcgggtacactggctttaatactggcaataagcccacttgccaacatgggggttgttgccgcggaagcaggcccagcacctgtatctacgaagatatataacacacctaaagactctttagagcagacgccgattcaataccagatccaggctcgattaaatgagaaggacatgacgatccaggggagcgagaaggtaacgtaccgcaacacaagcaaggatgcactccagcagctggttcttcatacatatgctgatgcaaacctctccaagtctacacaggcgagcatgtaccaacagcataatgaaaagattagtgaagatcatccggagaagacagcggcggactttctgggtggcatcgatattcaggctgtaacagcaaatagccaatcgctggatttccataaggaaaaccaggcgttgaccgtgcagttgaagaagcccgttcaaccaggggaatcggtatcattccaactggagtttcagttgaatatcccctatggctcacagcgagtttcctactataaggacatgatcaatggtgcacactggtttcctgtgatgtctgtatacgatgaggttaaacatcagtggaacaaggcaccgtatagtcaaacatttgagagcgattattacacctcatcggactttgaagttcaattcaatgttcctgatgagtatcaggtagccatgccgggcacgatcaccactaaagacagtacagaacatggtcgtaaagttgtttctgctgtggccgagaacacaagggagtttgtattctttgctagcccaaaccttcaagtggagagtgttactcgtaacggtctgacggtggaatactattattacaacgatgatccatccaagaaaaagatagttgaccgctacattaatcaggcattcaaggtcatcgatttctatagtgagaaatatggcaagtatccctatccagagttccgaattgtcgagacgtatgtacaaggcgttgccgtggagtatgcgaggctcatccagatgggacagattcaaaatggtgctgttccagaagaagacacaacatttgttcatgaaatagcgcatcagtggttccatgcattgatcggtaataattcggagacagaatccttcctggatgaaggctttgctgatttctccatggtgtattttgccgagaaacagggagacaagctaaatggattcagatccatacagtttgatactgcgcccgtagatatggcgattgcgtcaacaaacgatgaagctggggatttggcaagtttggtatattatcagaaggggcgacaagcgatctatcagctttaccgttccgtcggtgaagagaaatttgacgagttgatgaggacatatttcaaacgctacgtgtaccaaaatgcaacggtagaggggctgcttcaaaccattgaagatgtgcttggtaaagaaatacgttcagaaatgcagatggccctatatcagcctgattttgtcttaaagccggaataccaactatcacaagaagagaccgccgcctatgtgcatgatgtcttacaagtgcaatatcaggctgtcatgggtatggttcctaatctgccttatgaagtgatgaatcgattgatgtacaaagcccttcaaggcgaggaattaaccattgtgctcagcgatcaggtgagtaagcttgcaactaaacagcaggaagatatggttaatcagttgaccggattccttgatatgactggtatgagatacgacattatacgggatcgcaaggaactgaagcaaaagatgaaaaaagagatcggaaacagcaaccttattgtcattggcaatgccaagtcaaacggattggtgcaggctttaaaacttaacattattgatcgaacgaaacagacgggttttacttggaaaaataccatgaatcaacctctcgccgcgggtgcatatgttatcaaacatccctataaccagaatcgattgatgcttcattatttctggaatgaggatcatctgagtgatgaggcatttgaagcttttaagctgaaaatacaggagtctatcggattcactaacgacttttaccagtactatgtattggataaccaaggcaaggagaaatccaataaaaaagttgcgaatcccatatcttcactttttgcggagtaataaggaattggttttgcagtttcttcgttcaaacaggttagccaatttgtattggttagcctgtttgtgttttatatgagaaccagtcttagaataataggctgtaagatgggtataatgctttaacacaaaggcaacttcatgaatatacttatcgggagaaaacaataggagggattaatatgaagaatcaacattatccgggcgtaccaatgaaagggacagttgctgattacaactgtaaaagaaataaaggaatgaacaaaatgaaagcgtattcatataatgctagaatttgtcctatcatttgtattactcaggagccgactgcgaatgagggtaatgttgttgatttttcaatcctattaaaggacacttcggaagttttatattcgcgaccggtaaatggtaataccctgctcacgaaggagttgagttcccatgtctatgactgaaaatattgctcaggcagcactcgatgcagcgatgaaggcaaacagggccgttgcgccttatgattattgcgatgcagaaaccagacggatgtacacgcctcaatttgataaaaaaatggacaatcctatgtataccgctgcaatggccgggcttcaatcaatctattggtttcgggcgatcaaggtaaaggggcttatccctgatgcaaaagcggattattatgctacgtattctaccaaccataatcacatcggaggaattggactagcctactcgaacagccctacagggccatggaccaaacacggacaggtgtatctcgatactgtggttgggaattcgacggaaactccatttgtgatctggaacgatgaagaacaattgttctttatgtattatcaacaaaacggactggggatcaatcaatcaacggcacttgcgacctctgcagacatgatcaactggacaagagtgggtttgattttggacaaacctcccgggttcccaggtgatggtcataccggatatttctcgtgtttcagaaatggaggcaaatggatcggtttctcggtgatgggaggtggtgactttggtcgtaaatgtatctggtattcacatgacggacgtagctggttagctgatccaagaccattaatgggtgggaatgatgccactttaagtgcaggagaaaacatttcgagaccaaatgctggtgtatttatgtacaaagggagcatgtggtggctgggtatgttatcagcttatgcttccggtggggttacgacggtagctcggcctgccattgccaagatcagcgcagactttcgtcaactgctggacaaacctacagatatatattttccggcattgaattgggagacgaccaacatgcaatccttgatggtgtccgttatggacggcgtagtgtacgcgtattacaataccgatcataatatcggtgtagcctattcggtgggggtgtagagatggttatacgtgatgcagcgggtcagatcgtgccctttggaaaggttcacaaacagcttgtggctgattttctttacggaacgttaccggattgggtggaggtggtgggcactcctacgtttgagcctttgcccgacagagggaccattactgttacaactccgacaacggcaggagccacggcagagttaaaaatgaaacatctgattgacagctcgaaagtaacagcaattgcaatcactttggaagcgctacaattaaacgggaacattggaatctcagttcaggttggcattaaatcgaaggatagcaaggccggaatcactttttttcaaaacgtaaatcagaagtatggtatggtccgtgcctataaagcagatggaacgtacacggattttaatcaaaatatggtgttcttcaccacacatggcgtagcaggagatgaagcacagaaccgtaagaatctcactgtgctgctctgtaccggattacagttctcggcggggttcgagagaccgtcggtatggcttggtgcggatgatcaatatggtggtgttgctgctgaccttagcggtgggttgttccaacatggagaactgcaatgtcttttgaagctgactacaagtaaggccgaggccaagtatttcaaatgtgcacagatgaaagtggatatctggagtaattaatcaaacagggaagacgtatgaagatgaacaaggtgcatgatttgaattggaatgactatgagaataaatagattatctgcatggatcggtaaaaagatatacgtgcagtgatttggtacctaaacacggacgctttgaaaatgaagtgcagtgtttgggtaccttttttatttagagaatgaagtcaggccaagtttggtggatacagcgaacaactcagaaagtgcactgactttaggtttgggcttgtccggggttagaaatgaattattctccaaacgtgttttaaactatatttttttataataactatttacatacacaattaaattgtgtacaatgtaattgttagcgatacaagagagatcaaaattcagtcaaaataaatctaattaactaaaggagttttcacaaatgaaaacattatatgaaacaacagtcatcaatacaggcggacgtcaaggcatcgtacaatccccagataacgtgtttatgttggatgttgctgcaccacctgaactcggaggacaagtgacgacagctaccaatccggagcagttgtttgcagcagggtatagtgcttgttttaactccgcactggagtttcaattgaagaaacacaaagttgagattgaaagaagtaccgtagctgcaacggtaatgttggtgacggactctgaggataacggcgtgaagcttcaagtagatttggaagttaaaatccttggtctagatgaggaaacagcacagaagtttgtgaaacttgcccatgactactgcccatattccaaaggaatcaaagggaacgtgaatgttaacgtggaactcgcgtaatcactgatactatttgttgatagaagcctccgagaaatcggaggttttttggtgttttatgcataaaaatcaatttcacactcaattgtgggttataatggtagtaagtttacacaaaactgctgaaaggggaatgtacttatgatggattttagcaaaccaccccatggctctgagaccgatacccaccgtcagcgtcatcaggagaatgaacaggaatacctgtccggaggcaagggtatttggtatgaaatcagcaactggctcattctcggaggtatcctccttgtcatatttttattatttaaatacgttttctaaatagacacacaaccgggcgaatccccatatgatgcattacatcagtaagcacttggggaaatggggaatccgggatggcaaaggcaaagggtaagaaagctcccgcattaaagagtgataaaatacgtgtatccatgaagttggtcacatcggatgtatgcgagagatgtaagacaccatgtacacgaggcatggattacgcagcacgtatgagaattgaaggggctttaggcaagggcgttccctgtatattgacccgccatacttcttcataaactcttcgtataatcccgtatatataacaattatagatcaggggcatcctttaatgaggatcgcctctttttgtgcattccaaggggtggaaaaaattctggataaaaaatgaaaaatgatgaaaaacagcgcaactttgtggatgaatctgcagtataaatgtacaacagctagcagcaggggagggaatattgacgggatgaaatggaaacgaatattgctttgtgtcacggtattctccttgctcggcgggtctttattgtttgcagattcggtgaacgagaagattcgtgttctcattaacggcaaggaagcagctgatggaggttatctcattgatggaacgacctatgtacctgtcagggaagccggaggcgtcgtcaaatgggacagcagtaacaagagagtaacggtgatcaaaccgaatgtacatatttttctcttcaagggagacactgtatttggcaacgttaacgtaggtaagctgaaattcaatgtattttcacaagtggacagtctgacagcagatgtagctgcggtgaaagtaacgattaccaatccaagcggtcaggtgaaggatatccagtcacaggagcttacaacccagaaggataacttctggttccgcacatatgattttacgtatgatttcagtcgtgccggcaaatatcaggtcggctttcatattaaagaaaatgcaaacagcagctacgtcctggtagcggagaaaatcattacagcgctgaacgattgaagcgaaaataaccctgtgagttaaattgacctgtgtcattgaacatgttacgatatgcagggttacacaatttctatttataaagcgaggtatttcaatgagcgatcacacacatgaacacggcgatggctgcggatgcgggcaagaccacgaccacgaccacgagcatgaagaagtccttctcacattaacagacgagaacggccaagacgtggagatggttttggtggagacgtttgacgtggagaagcatgtttatgcgctcctgctggaacgtaacaatcctgaagctgacggcatcatcctgcgtatggaagaagaagacgaggaaatggtgctctacaatattgaagacgaagaagagtggaaccgcgttgaagcggcttacaacgaactcgttgcatcacaagaatagtcattcttttggaacataacatgaaggctccttgatctcagggggccttttgtttgtttttcaagaggtatacgagcatttacaccaccggtttgaactacgaaatagacgggaaaatgcaaactcgcttgtcccataaaataaaaacggaccaagctagggcttggtcctttaagtttatcccctgcacagcgcaaggaggttgttctagaaaatggcatcggcttccacgatcactttaacgttggttacgctgcgatcttcgggtcctttgacgggtaatccaacttcgacatgatcgatgatgtagtcgatgttttcctgggtgataacctcacccggtaacaggatcggaattcctggcggatagacatagatgaattccgagataatacgtcctgcggattccttaaacggaatcacttcggtatcaccgtagaatgcatcacgtggagtcagcatcaactgtggaatatccggaacttttacgaccagttcatgggccgggttcacttgataataggtacgggagagatcctgcaaagcgttcagcaagatatccacactattatccgtatctcctggcgtaatgagacacagaatattgtacatatcactaagttcgacctcaatgttgtaatgttcacgcagccagttctctgtctcataccctgtaatacccagatggcgaacatggatcgttaccttggttggatcatagttgaaggtcgcttctgtacccagcagctctctaccgaagcaatacaggccatccatatcgttaatcgaacgtctggcaaactcagctagttcaatcgccttctgtgcaatctcacgaccgtggagtgccaggttacgtcttgatgtatcgagtgaagcaagcaaaatgtatgaagttgatgttgaggtgagcagactcaggatcgtctgtacacgctgtggatttacgaacccattcttggtattcaggttgagtacggaactctgtgtcatggagccaccaagcttgtgaacactggttgcagccatatcggcacctgctgccatcgcagacaacggcagatcctcatggaaatgaatgagtacgccatgtgcttcatcaacaagtacaggaacttgataactgtgtgccagttcaacaatctctttcagatcggtaaccacgccgtaataagtcgggttaattacaagcaatgccttggcatccggatgacgctccagtgcgcgacggatagactgtgtggtcactccgtggtcaatgcccagattgggatcttgtgaaggagaaacaaatacgggtttggcgcctgagaaaataatcgcggacagaaccgatttatgcacattacggggcacaataattttgtcacccggtgagcatacagacagaatcatggtcataatggcactgcttgtgccttgtacactaaaataggtataatcggctccgaaggcatctgctgccaaaatctgtgcttcctgaatgacaccggttggctgatgcaggtcatccaacggtgcgatgttaatcaaatctatggagaaggcattatcgccaataaattcacggaattcggtatccgctcccaatccttttttatggcccggaatatgaaactgtaccggattgagtgccgcatgattttttaaagcggtaaacagcggcgtacggtggtgattcatcagtgctgtcacaacccttcctaataaaattggtaaacaaagatgagtatagcaaattaagaaccgaatgcaacagtataaatcgacaattttttaaattgccgagatttgcgcacattccccacggttacactaaggatagggaataggcaaatgaacaccgaaaggggaaaaagaatgcaaaccgacacaaaaccagccaaaattttgcgatcaccattttttatcgcgatgtggctgacactttttctagttgaaattatcaaaggggccctgttggtagctgttctgcccgtgtatatggacaatatactgggtctgtctgcaggcgtcattggtgtggcatttgctcttcaatatttgggagataatctgttccgggctccttccggctgggcagcagaacggatcgggttccgcgcaacgatggttacagcattaatctgtaccttaatcgctgttattatgatcctctttctcaaaagtgccgttggactggccatggcctgtctgattcttggtattggtacgtcaccgctctggccttgcgccatgacaggcgtgacggcgatgtcaggcccacagaataagaatggtacagcaatgggggcgctggaggtggctgctctcggcggaacggggcttggacctataggtatgaactggctgctggagcgcacgcatcatgattatcaaactatattcctcgtgctgatgggttgtgccattctcgttattctggtggccatgattcttcctggacgtgtcattgttgaaggagagcatgccgagcaagcagcgaagaatagtgatgtgaaatatccagccaaaccgaatctgctcacgccgttcatccggctgcaaaagagtgtgaaggacacactgcaacgggtacgcagcacgcttaatgttaatccactggtgtatcctgccctgtttatgcagtcgtttgtcatcgggctgctcagtccagtaatcacgctatatacacgcacagatctgcacatctcgccgaacctttacagcttgttgctgattgcaggtggtggaataacggtcattgccttgctgcctgttggtaaaatggtagacaggtttggcacgaaaccgttcctgaatgttggttttttgatggcggcggcgagtctgtttgcattctcctccataacatccattccggtggtgtttggtgttgtcatgctggtgggcatcagttatgccatgattttgcccgcctggaatgcttttgtagccacgctaattcccaaaggagagcggggagcgatctggggattcttccttacattgcagggatcaggtatggttgtcggccctattgtttccgggttgctgtgggaccacgtgagtcatccggccccattcattggcagtgccatcgtcatggcaggacttgccgttgtgcactttgtgttatcccgcaatccgtttcgcaccgctccggccaaataagcaaaagaaaagggagttccaccaaccgtcttggttgtggagctccctttttcgcgtccattatatcacgataatcgggggcttgcccctgtgcgtctgcggaaagctgcaatcctgcggtcctttcggtgaaaaatagtcaaataaccaagtacccttacataaaatgaagtataaaatagggtaagccgattgagtagaagcgattgaagacgagggccggagttgatccggtacagatggagggagtgccgtgaataagagttatgaagttgaatattgcaatctggagctgcggttcaaccgtcggcatatccaaaatttgatcagagaccttattcgtgagggatattcactatattggagcgaggacgaatccttttttatcctgtcagtccggaccggtcgcaagctggtaaagctccgctttcaacagacacgcacagggaactacaagatgactggggattatatcattaaggatgcaaagcttgcagagtggctggagaagctgattggagatacacgcgggcatgcggttgtgaagcggttcaaggatcagcagatgaccgtggagaacattttattcggtgaagtgattcggctcgtggaagtttccggattcaaacagcgtgtcatttttcaaaaggaacctgcgccgacggcggaagagatggaagaaatgttcctctcgcgtgaaggcgaggaaaggctcatgttgttgcgcatggaagtggacgatgaactggagcgcctctacacggccatgcagatggataatatcgaaaaagcaaatgcttgccgtcaagtcttaaaacagttgtctggacatctgttaatgttggaaggatgacaagataaggccgtatttatgaaaatacgatgaacacctcagcagattggggtgttttctcgttgcgtagctgtgccacggggttcacttctatacataaaaccgttaaaatgggagtattgttgagaatttatttcaataaaattaattggagcaaaggatggaggaccagatgacaaaacaacaaattggcgtaattggcctggctgtcatgggcaaaaatttggcccttaacattgaaagcaaaggtttctcggtatcggtatttaaccgttccccggagaaaaccaatgatcttctgaaagaagctgaaggtaaaaacctgacaggctcattctccattgaagagttcgtagcatccctggaatccccgcgcaaaattttgatcatggtacaagccggcaaagcgaccgacgctaccattgaacaactgcttcctcacctggatgagggcgacatcatcattgatggagggaacgcatacttccctgacacgcaacgtcgcagcaaagagttggaagacaaaggcattcgtttcatcggtacaggtgtatccggtggtgaagaaggcgcactgaaaggcccttccatcatgccaggtggacaggaaagtgcttataaactggttgaaccgatcctgacggcgatctcggccaaagtcggtgacgatccatgttgtacatatattggacctgatggtgccggacactatgtgaaaatggtgcataacggtatcgagtacggagatatgcagttgattggtgaagcgtaccacttgctcaaatccgtattgaacgtttccgttgaagagctgcatgcgatctttacggaatggaatcaaggagagctggatagctacctgatcgaaatcacggcagatatcttctctaaatacgatccagaaacgggcaaaccaatggttgacgtcattctggatgctgctggacaaaaaggaacaggtaaatggacaagccaaagcgcgctggatctcggcgttccattgtccatgattacagaatccgtattctcccgtttcctgtctgcgatgaaggacgagcgtgtagcagctagcaaaatcctgaatggaccagcgactgaagcgttctccggtgacaaaaaagcatttatcgagagcgtgcgtaaagccctctttgcaagtaaaatcgtatcctacgcacaaggatttgcacaaatgcgtgcagcttccgacgagtatggctgggatctgaaatacggtaacattgccatgatcttccgtggtggctgtatcatccgttcgcagttcctgcaaaacatcaaggaagcttatgataaagacgcagcgctgaaaaacctgctcttggatccttacttccaaaacatcgttgagtcttatcaaggcgcatggcgtgaagttgtagcggctgctgtaaaacaaggtgttccagtacctggcttctccagcgctctttcttactacgacagctaccgcacagagcgtttgccagcaaacttgctgcaagcccaacgtgactacttcggtgctcacacgttcaaacgtgtggacaaagaaggcagcttccaccacaactggatggagtagtaccacatatacaagtctattagatttggccaaagtgcctttaaacaggagctttggcctgctaaggggctcaaaagaggtttggcgttccggtgattgccggtttacgctgagcctcttttttactgtaaataggctcattggagttcgttagtttgctgggatggttactgattgagatgtttggaggctcaaaactgcttgagggtgatctgacgtaggcttagatgccgggagttacttaatctgtcttggaagtacttgcggatggtcgaaaggaagtcagtgaggagatggtctttcccagtccgcagggctgtgttatgataggacaaaagtgctcacgaattgcttgaattaaaggagtgtacaccttgagcaagtctaacaatattattctcatcggcatgatgggaactggcaaatcaaccgtcgctgacatgcttgcacgcgagcttggttatcgattgattgatgtagacgccgcggtggaaaaagaggaaggctgtacgattccggaattgttcactggcaagggagagacgtatttccgtgatgccgagagccgcatgttatgctcggtgctggagaagaagtcacaggtcatagcgactggaggtggcgtggtgctgcgttcggataattgtgacgtgatgttgaaaaatggttgggttgttgccttgactgctgatccggcagtgattgtagaacgtgttagtggctgtgacaatcgtccactcctcgcaggcaatgcagaggaacgcattcaggcaattatggaagaacggaaagacgcatatcggttcgcacattatacggtggatacaaccgagttatccgctgctgaagtgactcgtttaattttagcgcattaccgcgtctaagcttgttatcatcgaagtttgatggttgataggtggtggcagatataacaaaacgggccatataggcccgtttctagaagtggagcagagcagaagtcacaaggttacaaatgactttgcttctctccgggtttctctagtcttcctgttgccactgaagcataccgccgaccatgtttgtacagccttcatatcccagttgctgcagatattcacaagcacgctcactgcggtaaccgctacgacagatgatcacgatctcgcctgatttctcaatctcagacagtcggtccggaatctgtccaagcggaatatgcttggctccttcgatcatgccttgcgcgacttcatcgtcctcgcggacgtctatcatctgcagcttctctcccgcctgtaaacggcggcgcagctcagacgtttcaatttcagctatttgtgtcatattcaggtcctcttttctgtatggacttaacgcctataatgatacccaagcgatgcacggaatgtcaatttggccacaatataatcaatgaaggagaatttcatccatggacgttattgttaaaccaacccccacgctgaacggggaaatcggggctctgtcctccaaaaactacacgactcgctatttgctggctgctgcactggcagaaggcacaagtaccatccatttcccggcacacagtgaagacagtgacgccatgcgcagatgtattcgcgatctgggggcagtgcttgaagaagacgacagcaagattgtgatccagggttttggcagtcatccccgtgatgtgcgtgaattgaatgtagggaatgcaggtgctgtacttcgtttcctgatgggcgttacagcgctctgccctgaagtaacttttgtgaatacgtacccggattctttgggcaaacgtccacatgatgacctgatcgatgcgcttggtcaattgggtgtagatgtacagcacgaacaaggacgcttgccaattacaatcaagggtggcaatgccaagggtggacacattcgtgtatccggctccgtcagttcccaatatctgagtgcattgttgtttgttacgccgttgcttgcagaagacagcaccatcgaagtactgaatgacctgaagtccaaggtcgttatcggacagaccctggaagtgctggagcaggcaggtatcgttatccatgcaagtgatgattatatgtccttccgtgtaccaggtggacaggcttaccaaccaacgacctacacagttcaaggggattatcccggctcagcagcggttcttgccgcagcagcggttacacagtctgatgtgaaaattctgcgcctgatggagcagagcaaacagggtgaacgtgccatcgttgacgtgctgcgcttgatggaagtgccattgacacatgagaacgatgttgtacatgttcaaggtaatggcagactgaaagcgatcgaattcgacggggatgccgcgacggacgccgttttggctatggtagccgcagctgtgtttgcggaaggcacgtcacggttctataatgtagagaacctgcgttacaaggaatgtgaccgaatcaccgattatttgaacgaactgcggaaggcaggagcaaacgttgaagagcgtcaagctgagattatcgtacatggacgtccagaaggcgttgaaggcggcgttgagattaacgctcactacgatcatcgcgtaattatggcgctcactgtcgttggcctgcgttccaaggaaccacttcgtattcgggatgcacaccatgtagccaagtcttatccgcaatatttcgatcatttgcaggcgcttggcgcctcggttcaatgggtaaaagagtaaataactgaaaacctgttttttgaacacgcactttaatcagaaaaggatggtgcttgaacatggaatttaacaaccctactcgtgaagaaattggacaacttttgcgcaaggcaggcaacatcgcagtcgtcggcttatcagacaaatcagatcgcacttcctatatggtggcagaagccatgcagagcagaggctatcgcatcatcccggttaatccacaggtgcaaggtgaaatcctgggcgagacggtatatgccacactcgcggatattccagagccggtagacattgtcaatgtgtttcgtcgcgaagagttttgcgaggatgtcgctcgtgacgccgctgccatcaaagcaaatgtactgtggctgcagcttggcatccatagtgatgaagcggtccagattgctgcagagaacggcatgacagcggtaacgaatcgttgtatcaaggtagaggattccatcgttctgcgcggcgctggacgcggctgagaggctcgttcacctgtgatcgaatgatctcctgatctgaaccaattgaatgattataggatgaatcccgttaacttgaagttgacgggattttttctgttccatttttgccgtattaattaccaattggttactgttttgctttgacaaaacgttgcgtaaagcttaccatctaggatagaaaggagaggtcgccatgaattggctcggatccttgcagcagctcggacgagcggtaatgctgcctacaatggtcctgcccgccgccgcaattttgctcagtgttggcagtctgccttgggacgcctggggattggatattgtcggtgaagtgtctaccgtggccggacacggtattttttatttcttaccgtatctgttcgctgtcggtgtagcactgggactctccaaccaggccggacaagcgggacttgctgctctggctggtatcgtgatatatgatcaggtgactcggaacttcggggatggcaccgttcagcccgcttccttaatcggaatcatactcggcgcgcttgccggtgggatgcataatcggtttaaaagcattaaactgcctgaaattttacaattttttggaggttcaaggtttgttttgctcattgttggactctgttcggcattgttctcctgttttatgttatggctcgctccgatcctacagcatggattgaacggcattgctacctgggaatacagtctcgggggttttggactattcatctacggagtgttatacagggtgctggttgcttttgggcttcatcacctgcttaacaatgtgttttggttccagttagggacgtttgaaacgcctgatggtaacattgtgcaaggggatttgccccgattttttgcaggtgatccaacagcaggattctttatggcgggtttgtttcccatcatgatgtttgccattccggcaatagcctttgctattattcaggaagccagggaagatctgaaaccaaaaatcaagaaaacttttctgacatcggcactcgtttgttttctaaccggggtatcggaacagattgagtttgcttttttgttcgcggcaccatatctgttcatcgtgcatgcagtgatgtccggcgttgccatgtggattagttactggcttgatatccggcatggattttcttactccgcaggtattattgattacatactcaatttccatctatcggagaatgcttggaagctcattccgattggcatactatatgggctggtttactactttctgttccgatgggcgattcgtacgttcaagattccaacaccaggacgtgaagagggctccatgctggaagattgggtaggtaacattccttatcaggcacctttaatcctcgaagcattgggtgggaagagtaacattgtacaggttgaagcttgtattacacgtcttcgcctgactgtgcatgatgaccgtctgatcgacacgggtgccatgaagagtatggggtccgctggactgatcaagctgggtggcggtaacgtacaggtggtattcgggacctactcggaattgattcgggaagaaatcgcgaagctgctggaaagagatctgcaacaggttctgttctgtgcccctgttcagggcaaaatgctcccgattgaagaggtgccggatcagatctttgcagccaaacttgtcggtgatggtgtagcctttgttccggaaaagggagagctggtctcacccgtgtacggaacgattatgcacttgtacccgaccatgcatgccttgggtatatctacccgtgaggggcttgaagtgttactgcatatcggcatcgatacctctcagttgaaaggccattttgaagcttttgttcaggagggcgatacggtggagccagggcagttgttgatcaagtttgatctggcagtactccgcgagcaagcggcgtcactgacaacaccaatggtaattacgaatccagatcgtgtaaaatcatggagttttgctccatttaagcaagttaagaaaggtcaggcatccgttatgtccgtggtgctctatgacaggaacgttggaggggtagaatgaagatacaaggcatcaacggagctgcaggcatagccatcggcaaagcatttgtcctgcccagttgggaatgggatctgccggatcagaagatggattcggtggatctcgcccaagagttcgaacggctgtatgagggcatacggacatctaaggatgagattgaatatatcaaaaatgagttcaaggaagttgttggtccagaggagtccagtatctttgatgcacatctggcaatcctcgaagatccggtattcatgaacgaaattcgcggtattattgagcgtcaatataaggcagcagaagtggcggtcaaagaagccattgaccactttgtcacgatgtttgacttgctggaagacgagtatatgaaagagcgggccattgacatcaaggatgtgggtaaccggctgctcaagcatttgctcggtgcaccggagattacacttccttcggatacccagccgtatgtactcgttgccaaagaactgtcgccatctcaactggcgcatctgaatcccacccatgtattaggcattgtgaccttgattggagggaaaacatcacattccgcgattatggctcgtgcccttggcattcctctcgtttccggtctggaagcgagtcttggcatgccggtagagacaggggatatgcttgtggtggatggtgacaatggcttggtatttacggacccggatcgcaagacgattgaacggtataccatgcttcgcagcaaacaactgaagaaaaaggaacaacttcaagtccttgctaccgtggatgccgtaaccaaagatggggccgttttgcacttggcttccaatatcagttcggtgaaggaattggaccttgctttgaaacaaggagccaagggtgtgggcttgttccgaacagagtttttgtatatggaccgtgctacgttcccgggtgagcaagaacagtatgaggtgtaccgtcttgtggcagagaaaacagcaggacaatctgttgttattcgtacactggatatcggtggtgacaaacaactcgattactttgaattgccggaggaagacaatccgtttctgggttaccgtgccattcggattagtctcgaccgcaaggatctgttcaaaacacagcttacagccattctgcgtgccagtgcggccggaaatgtcaaaattatgtaccctatgatctcttcggtggaagaacttcagcaggccaatgagattcttcgtgaggcgatgtccgatctggacgagcggggattatcatacgaccctcacattcaggtgggaattatgattgaagttcctgcagcggtgatgattgctgatctgctcgcagaggaagctgatttcttcagcattggtacgaacgacctggttcaatatgtactggcagtagatcgaatgaatgagcagattgctcacatgtatcacccctatcatccagctgttctgcggatgcttcgtgcgacagcagatgcggctcatacggctggaattgatgtcagtgtgtgcggagagatggcaggggacgaacgtgctattccgctttggttggagcttggcattcgccacttgagtatgtctccacaatccttgttacgtgtgaagcacagagtgctgaacacaacagcatcgaccgccaaagaagaagcgcgaaagtgcttcgccttacggaccagcggagatattgaggagcgactacaagtctttaatgactccacgggaagtccagatgaacaaagtggttcgaacgcatcgtaattagggaaactggatataaatacctttaagttaatatatttacatttgtgataattatttgttggagtacttgttatataaaataaccccactgtgcatgagagcacaatggggttatttttacttgtcagcgagtgcatcacagaatgccttgccataagggggaaggtcaggcggacgacgagctgagatgatatgtccatcaacaacaaccgcttcatctttccagatagcacctgcattttccatgtcatcccgaatgcctggtgtagaggttactgtaactccgtccagaattttggcagaaatcagcacccagcccgcatgacagatctgtccaatcggttttcggtctacattcatttcctttacaagctccagtactttgggataacgacgcagcttgtctggcgcccagccgcctggcacgagaatgccatcgtaatctgaactatcgagttcatcgaaactgtattcggcttcagcaggcacaccatatttgccaatataggtttttccttttttctctccagcaagatgcacttctgcaccttcttcacgaacccgatgcacagggtaccacaattccaaatcctcgaattcttcatcgaccagagcgatgacttttttaccggttaatctcatgtccatctctcctttttgcgttgattaggtctgttgcgtctttaattgtaacagattctccaagggacttcatggaagtgcatattcagtttggaggaagcgattacaagtcagtaactgcctgcattcgacaaccttcatctggagggagtggtaatttgtgcaacctttcgtttatagcaggatttgagccgaaataggtcgaatggtacttatatagagtatagaacgaatgaggtgatggtggtgcgcaagtcgtgcagatgtggacatgtaatggagttggaattaagaacagtggtgtacgccaaaaaagtggagattcgaaacgtacccgtatttgcgtgtacagactgtgtatcatatgaagtgcttccgccggtcaagccggacttaacagaatgcattaacacattgggtgaacagcccgtgaagcaagacgtatcttttggtgaacgtaatgaactggcagacctgtttcatgagttactgctggcctggccggatgcgaccgatcgggagatggaacatcgtatgcagcaagcagtggaggagcgtatcaatctgctgctggacattatgggttacgcaacgaagtctggtgatgcagcgtggattgagaccacggagcgtagattaagtcaattatccggatttgtgtggcaggagtacttctcaaatgttgtctaattttgacgtgtaaaatgcttgttttcatgaaaattggctttttcgctcactttttgttaagatatcgaagagtgaaaacgctcaacatagcggtattcctggtaaagggggatgtatatctaatggctgacatgactaaaatgacaagtattgaacagctaaactccgcagtggaggctaccaaggatcaacccttgcttctgtttaagcatagcacgcgctgtccgatcagctcgaacgcttatcaggagatgaacgattatttgcttaacaatgccaatgaacaagtgaaatatggcatcatctatgttgtggaagatcgcccggtatccaatgaagcagcagacaagctgggtgttaagcacgaatctccacaggcgatcctgattaaaaagggaattcctgtatggcatacttcccattcagatattactagaaccacacttacgaatgttttgagtgagtcctaaagcctattttaattgattaatgcaaaaatttgtcgtaatataaatcttaatgaaaatggtatgaaaatttactggtaatggagagaagtactgtgacggtaaccatttatgatgtggcacgtgaagctggagtgtctatggcaacggtatcacgggtagttaataataaccctaatgtcaaaccgcaaacgcggaaaaaagtatatgaagccatcgagcggttgggatatcgtccgaatgcggtagccagaggtctggcaagcaagaagacaaccacggtcggggttgttattccggatatttcgaactcaaccttcgcggagattgcccgcggaattgaagatattgcgaatatgtatcactacaatattattttgtgtaatgcagacaagaagaaagaaaaagaaattcgtgttattaacacgttgctcgaaaaacaagtagacggactgctcttcatgggtggaacagtaacggacgaacacattcaggcgttccagtctgcggctgtgccgattgtactttgtgcaacaagtgatgagaagggcacattcccttcggtggatattgaccatgagtcggctgcgtttgatgcggtaaacactctgattcgtcatggacacaaggaaattgcgatgatcagtggtacactgcaagatccggcgaatggatatgcccgtttccaaggatacaaaaaagcactggaagcagcggggattgaataccaggaggatcttgttcgaatcggtaactatcgatatgaatccggtgtggaagcaatgaaatatttccttggactcaagaaaaaaccatcagctatctttgctgctacagatgaaatggccattggtgccattcacagcattcaggatgacggtctgaaagtaccggatgacttctccattattagtgtggataacatccgtatggcttccatggtgcgtcctcagttgacaacagtggctcagccaatgtacgaccttggcgcagtagcgatgcgtttgctgaccaagttgatgaagaaagaaaatgtggagaacccacgggttattttgccgcatgaaacgattcttcgtctgtctgtaagtcatgcagatgtagtttaatcgggaatatatacagtaagggagaagtcattattctctctacatagtggatatgcgaaagctccggagacggagcttttgtgctgaattagtttaaaaatgaaaacagggggtatcagaagatgcgtgaaacgattggtattatcggagcgatggatgaggaagtcgagcttttgctggcaggtatgaagcagcttgagacggtcaaacaaaccggcattacatacgttgcgggcgagtggctgggcaagcatattgtcgtgtgcaaatccggcgtaggtaaagtaaatgcagcggttacaacgcagatcttgattgatcgttttcaagttaatcgcattatcttcacaggtgttgcgggtgcagttaacccggagttgaacattggagatatggttatatcgtctgtatgtgttcagcacgacatggatgtaacgccactggggtttgcacgcggggttattccttaccaggagacatcggccttccctgccgaggcttcgcttattacactggctgaagaagcgtgtaaagcacagggagccaattacctgatcggtaaagtgttatctggagatcaatttattgcaaataaagatacggttaacatgttatataccgaaatggacggtgcatgtgcggagatggaaggggctgcagttgctcaggtctgttacatgaatcgtgtaccatttgttgtcctgcgtgggatgtctgataaagcggatggttcggcgcatgttaactttgctgaatttactgtggaatcttcgcagcgttcacatcgtattgtggagcatatgttagaaaatatgtaatgacataagcttatattgcaatacccatccgaaatccatgaaaaaccgccttcgattagctgttccatgaggtatggagcaacgctgcgagaggcggtttttgttatgtatatcgtttttcgaacagatcattgaattagtacatgaaccgatggcggaagcgtacacgatcaaactgttcttccgatgtgatgggcacctgacttccgatacgtaccatcaaacagttcgcaggatgtgaacagatttcggggtcgtctgttgcataccaggtcatgtcgatcgtttccatcagcctctccatcattttgcgataatcccatacgtttagtccgctgcccttcagatcccaatgccaataatattctgtggtgaaaataatgtagttctccatgtatttatcttccaaagcggtaagtaacatctcacgtccaatgccaagcgagcgatagtcgtccgcaacctcgattgccccaagctctatcagatcagtcatattgccctcggaccagcgttcacaatcatccgcatagtgaaaggttacatagccgataatcgtttcattttcatgtgcaatgataattcgcccttcaggtagtgctgcgatctcggccagagcttcttgctgctccgttgggcgccgaaaggcatccagatccggatggaaggtaagacgggttatctcctcggcctgcacggggccttcaacagtaattcggtggccggacttgaagatggaacgcatatgatgttctttgatatgttccatggttcatgctcctctctttcctacttatagaggttgttccaaaaagaacgctatagcaaaaatccaaaaaatcgaaaagccatagacgacaattgaaaagttttgctataattgcgtagacaaaaaatgttcacaattcaatacagtatagttaacatctgtttggccgagcaagtacatgatgagaagttctctctactaatgtaagcgctaactggaagttcagtcaacacaaaggcaatgagaagtgacccctaacgggaatcgaaatgtcgagttgaaggaggctggcaagcatgagtcaagcacatggtgagatgctgcaaacggttgtgtctgaatctaatctgggcgattacacggaggcgagaagccggttcgattgggaatcggtggaaaggcactttacgtggcacgccagcggaaaagtaaacatggcgcatgaagcgattgatcgtcatgtactggaaggaaggggcggaaaaaccgctttattgtatagcgatgcttcacgtgaagagtcctatactttcgctgatctgagtgaacagtcgagtcggttcgggaacgttctccgcaaatatggcatagtcaaaggggaacgggtgtttatttttatgcctcgaagtcctgagctgtattttagtctcctgggtatattgaaagctggagccatcgcgggcccgttgttcgaagcttttatggaaacggctgtgaaggatcggctggaggatagcggagcagtagcactggtaaccactccggaattactgaagcgcatcaaacgttccgaattgcccgaactcaaacatatatttattgtgggtgggggcgcgcagactgaagaaggactcatcgattttgatgcagagatgtctgccgcttcggatgagatggaagtagagtggctgaatcgtgaggatggtttgcttattcattatacctcaggctctacgggtaaacccaaaggggtgtaccatgttcaaaatgccatgattcagcactattatacaggtaaggttgttctggatttacgtgaggatgatgtgtactggtgcactgctgaccctggttgggtgacaggcacctcttacggtatctttgctccatggctcaacggagtgaccaatgtgatacggggtgggcgtttcagccctcaagattggtacagcaccatccagaagaacaaagtcacgatctggtacagtgcaccaacggccttccgtatgctgatgggagcgggagaagagaccattgcccagcatgatctgagcagtctgcgtcatgtcatgtctgtcggtgaaccgctcaatccggaggtagttcgttgggggtggaaagcctatggtcagcgaattcatgatacatggtggatgacagaaacaggtgcacagctgatctgtaactatcccggaatgccgatcaagcctggctccatgggacgtccgttacctggaatcgaagcagcgattattgatgatcgcgggcaggaattgccgccgtacagtatgggtaatctggccatacgggcaccttggccatccatgatggcgaagatctggaataaccctgcgaaatacgaggagtatttcaggcttacgggctggtatgtatccggtgactccgcttatatggatgaagaaggatatttctggttccagggacggattgatgatgtgattaattcgtcaggcgagcgtatcggcccctttgaggtggagagcaagcttgtggagcatcctgcggtagcagaggcgggtgtaatcggtaagccggatgtgacacgtggggagatcatcaaggcctttgtggcgcttcgtgaaggatatgaggcgacaccggagctaaaagaagagatctatcgttttgtcaaagagggcctgtctgcccacgctgctccgcgtgagattgagtttaaggataaactgcccaagacacgttccggcaagatcatgcggcgtgtcctgaaagcctgggagcttgatctgccaacaggagatctatccaccattgaagactaacgcgacagtgctaggatcatcaatgtgtcggtatcgatgtcgatacaaatgcctgtgggggagaagttaatactctacgaagccaaatacggtgactctacccattaaaatcggttgtaaaagcctgctttatgccattggcatgaagcaggcttttttagcggctgcctgctgcacatgcaaataaaaagccgcaccctcagatacagtctgaggatgcggcttgttttggaacgctatgcctgaatcagggttgaaaatgtatggctgcagaagattcggattcacccgcactgttactggcagataccttgaaccatccactggtagatgcgggtactccataatccatggtatttcccgctgttgttccaattttggtgtaaggagccgagcctgtttcactgtaatatacagtataactatctgcgcttggagttgacgcccattgtatacgcagtccttgagagagggcagatacgctgacctgaccaggtgtgcctggggctgtcgttgttgtattatcggtctgcgtttctcccggcgtaatgactgtacctggaacttcaatcggttcatcaatctcttcttccacaggaggagctacaccagcactatttactgtagcgctaggagcagattctctgccggcaacatccactgccgttacatagaaggcgaagttaccgccttgcgctgcatatgcagagaatgatctggattcaccggtcaagacaacctgaccctggttctggaatcctccaccgtttacagaacggtacagacgataacccacgacatcattttcaggtgtggcattaaatgtaatgacagctctgtcacctgaggttgagatgcgtaagttgcctggtgcatcaggagatttgccgttatctgtccttggatcaatctgtgttggcatgtctgcaccagcatcttcaggaagataataagcaagtgactcatgtcgactcatacgtgagaatgcattttgcaattctttgatgagatccgagattggttttttacgcttgattactgttttttccttcaacatatccgaaggtgttccgtcacgcggaatatagtttacaccattgtaagtaatgtacctggctttggctacaccatcatcgctatccttcggaacaaacttgctgttgaaaatatccgtaacaaatttgtcagtcatggatgttggcaacttgccactatatgcagacaccgtgcgcgtttcgatgccagacggttttttgaacgaatccgtaacgaacagatctttttgcgtatcgatcacttcgttcaggattttcgaccacagttgctgcgcacgttttctctgtgatttactttccagcgtattcacgggctgtttgtatccgacccacacgccaagtgtgacatctggtgtataaccttcaaaccacacatctgcgtagttttgagtggaacccgttttacctacgattggcacactcttggaatatttgtaattttcacgtactttatctgccgttccttctgtaataacggtccgcagcatatcggtcatcaggtatgctgtctgctccgagaaggcttggacaggttcagtatcatgtttataaacgatgtttcctttggaatctacaattttgctaatcatgtaagaatcgttatatacaccattattggcgatagcaccataggcactggttaattcttcaacggttacaccgtattggagaccaccgagaacaccggtctgagcctgatagtcttccttctgaatggtggtaatccccagtttcttggcgaaggtccaagccttctcgatccctacttcttcattaaacaacttcagagccggtatattgagagaataattcagtgctctgcgggcagtgacgagtccctgataccggttgttggcattcttggcaatgtggtagccgctcggaccatttttgagaatgatcggtgagtcatcaataattgaagctggctgaacaagaccttcatctagcgcaggaagataagcggctataggtttcatcgttgaacctggctggcgtatcatctgcgttgcgtagttcatctgttcatcctggaaatcccgaccctcaatcatgcccagaatagcaccggttttgtgattaatcagcatggcagcagtttgttcttttcctttgacaggatcatctgctgagaaattgctgtcatcttccgcaatggtacgcatcgttttgtagatacttttgttgatggtcgtgtatatacgatatccacctgtccgcagttgcgtctgagcttcctccaataatgcactgctttccttctgaggtgtggctgcatccgtagctttgtctgtagattcagctgtgtcggaattcaactgtttcatcaaaatctgtgcagcttgtcgttccgtttccatcataagatatggataagtgttgtaagccttgatggtcttcggagcgagtgcgcttttgatatcaaaagctagagcttcgtcatactctgactgattgattttgcccagttcaagcatacggcgcagtaccagatgctgacggttgattgcgcggtcaaaattctcctctacaaaatcacctttaccgttaaaagcggagtaagaggaagggagttgtggcaatccagcaagataagcagcttgagcgatgttgattttttccagatcgttaatattgaacaatcctttggcggccgctttgattccgtaaacgttgtatccgctggaaccattaccaaaaggaactttgttcagataggctgtcatgatctcgtctttggtcaggaaacgttcgagtcggagtgagagcaaaatttctttcactttccgatcttctgtgcgatccagattcaaaaacacacgacgcgccaattgctgagtcagtgtactaccgccggtttgtactgattctttcagcactttctgtttcacggcacgtagggttccgctcatgtctacacctttatgttcgtaaaaatgattgtcttcaattgaaacgacagcatcaataaccttttgtgggatctggtccgtagtgaccggacgcctgtcttcttccgtacgtaattgaccgatcggactgccgtcggcaaagtaagcaaagcctgtgatggagttttcgctgactttttgttcaatcagggcccttgaacggacaggctcgtctttcacaatggaactgacgtatcccatcaaagcaccgcctacaaatagtgcccccataaatccaaggacaaccatccatttgacgaaacttcccagtctgcgggcaaagctgcgtttgcgtacaggctgttcatcgggctttttcttattaacatcaaccattcagtgtcttcctccttttaacagcacttattatagcataaaaaggcggctttgcatgcctgagaaatacaagtaatggtcgaaatttgccattctgccatgcattatgctatatatcatgcgatattgaagcacatttcatgagttgtaagccaaaataagcaggccacctccatgctgaggtgcatagggtggcctgaatgatgtgtcgtattggaggtttctacattaggttttgaatcgttgaatcagctctaatagttcctgggtaagattagccagtgaggcagatgccgccgtaatctcttccatggatgcgagttgttcttcagaggcagaggcaacacgcgttgcgtgatctgctgtctcatgaccaatggttttgagttgcactaacgtggcatcaacctgttgtgatccagctgacatctgctgcgcaatggctgagacatgctcaatctgctcattaacatctgtaatctgtgatgaaatggagaggaatagttcaccactttcatggatcacttccgctatatggctcacctcggcattcccctgttccatattttcaacgagagaaaggacctcttgctgaacgttatgaatcaacgctgcaatctgcgctgctgatattctggattgttcagccagattacgaatctcggaagcaacaacaccgaacccgcgcccgtgttcacctgctcgtgatgcttcaatggaagcgttaagggcaagtagattggtttgacggctaacttccgtgatcatgcctgtaatatggccaatctcttccgaacgttggcggaaattctccagtgcggtcatcgacgtctgcacagaagaagtggcactatcgaccatacgcatagcggactgaatcttatcagttccgatggttgttcgttcggccacagttcgcgatgaatcggatacatcggaggcggcctttgcaattcttccgatccctgcagatatttcattcatggaacgggaggactcttgcagctcctgcacctgtttacctgctttatctgcaagttcgactcctgttaatgcaatcagttcggctgctttacctgtttcttcggcacctgcggtcaactgttgagaggtggagccgacagataaagcatgttcggatataaccgatatggtatgacgcagggtatccatcatctgattcatatgacccgccatgatgccaaattcatctttggatcgtacaggtaacttttgtgtcaaatctccgccagccagctgtccagcgacgatattaacttgattcaactgtctaacaatggagacgatggtgtaggtaaccacacctgcaagcagaagtactgccagtgcggcaatcagtatggaccagttcaagctgtcatagaagggttgaaggatatggctctttggcagcgccgatacaaggtaccagtttgaatctgttccttgtaacctggcaggctcggcaataaatagttcttcccctacttcagggtctgtagcgtaaaactgagactcgccagactgtatacgctgaatgactgtcttcatttcagatggaattacggctccttcattagccagttccggtttggagccgtgtgcagcaatctgtccttcactagtaataagcatggcataaccctgatccggattaagtgatgctatgttttgctgaaaacgatcaatggtaaagtcggccccaacaatgcctagaaaatttttgttttcatctaatagagggaggacaatcgaaacgagcagtgtttcttttccgccaaccgtgtaggtaacaggttcggaccaatagatggatttggttttctttggctgctgatagtaagtactagtttcaccgcttccctcataagtaggcataggctcaaaatgcagggagttgccatcacgtataacgtatggaacgaatcgacccgtagcatcatcatattcttttttgttgatgtgctccgcatcgtttccatcaaaggcatttggttcccagcccgtataaaagccaaaaactttctcgtccttcttcagatattgttcaaggagtctgacgacttcttcacggttgagtgatccgttctgagctgcatccaataacgtggtactcatggtgtccaacgtgtttttcacctgattaatgtcagtcataaactcattcgtagcccggtttgctgcctgtccagcaacggtttcgccgtactggaggcttttgtcgtaaatggatttggtattaaatgcaatcagggctccaatacaacagagtaatacgatcccgagtaaaagtccaagcttaacagcgagcttgcgattgcgaaaaaaatgcatgttttaatccccctcgatgtcattcttgtgatgtatatatggatgtgtgcttctcctgaagggagtctatattttatatcgttatttacgttcctataatgaagataattaaaaaaaagcatagaaaaacagctgtcgagaaaatctcgacagctgtttgggttgaaactttaatgtgattgcaacgattaacggttgtagaactcgacgatttgtttttcatcgatgtcttgggacaattcagcacgctcaggcaagcggatgaatttaccttctacagctgcttcgttgtattcaacgtatgctggaagatgcgaacggccttccaaagcttctttaatggaagaaagagcgcggctcttctcacgcaagccgattacatcgccagtgcttacttggtaagaagcgatatcgacttttttaccgtttacagttacgtgaccgtgtgctaccaactgacgcgctccagcgcgggagttagcaaacccaaggcggtaaacgaggttgtcaaggcggcactcaagcaagaacatgaagttctcaccggcaataccttgcattttttgagctttagagaacagtgtgcggaattgcttctcgcccaaaccgtacatgtggcgcaatttttgtttttcttgcaattgcataccgtagttgctgatttttctgcgttggttagctccgtgctgacctggagggaaaggacgtttcaattctttgcctgttccgctaagggaaatgccgaggcgacggctcaatttaaatttaggaccagtgtaacgtgccatgtttaaagtagctcctttttagttaaagttcatattagggctctgtttgcgctccaatttgttgatgcgggcttggccacgcatagaacgatcaggaaagttcagccgctgtcctgaaagcaacaaaaagaatgagggtgacacaaccggtaatgcccaaatttaaagacccattagtagtcttcatcaacaatttatattacagtttaagagaaacaaagtcaagcgcagaataaaagcaaaaaaacgtctaaatttgtcgataggtcattgggcctaaaataatgggacaattttctgaaatatggatgcaaaaatggtttaaacagagtaaaatagattgtatcttaactttaaatcatctttatgtaacaaggttatcgcaacgaatttgcaggtttgcgataacgtctgcagattaatgcatcctggtggatgcaaaaacggtgcaaaggagcgcctgacatgttagaacatctaagaagtttacctgccagcttgaattcacgaagttcgggcgattccgcatcttttgccgctcctcgttctcatgaagagcatgtgttgtggatgcaaaaaatggatatcacaccttttgatttttcatatttgggcagcttgctagagcaggcatatagtgactggaactccagagtgggttcaaggctggccagaccatcaaccttttacagcgtgtggaacacggaaggtgattgcataggattcgatagcgatcatgaagctgatccgggcgtaaatgcacgcaggctggtattggaatgtttggataagagacaggccctgtcccttaaagggacaagcgaacacggagaatatcttataataacacatcccttattctccagaactaacaaggatatgtttgccgtattcaccgctgtgatctatgaatccaatggatatgaaacgtctgaagctgtggttcaatctgaggcattgcattatcacacctgcttttaccgaagattcgaatacatatttatgacggacctgttacatgctcatgaacaaacagctcgtgaggaacaccggaggtccatcctctttcagattgttcagcgaatgcatgacaaaatggatgtcgaggccatattggatgaggtatttgacagtatggattacttgtacccggccacttatatcaaattgtatatgtctcaggatcagagcaactctgatccacggattaaaccgttgcttgtccacgagcgaggagaagatatttgtgtgcgttcatttatggaaggtaagctgatcgttgctcgctcacatgatgcagagaaccgcattgtagatgtagggattccgctgaaaggcaaacaaggcatatacggtgtgttccatatcgaaatgaatgaagagattatggaagaatcggacttgcaattgattacgatgatggtagacactgcaggaacggcctttgagaacgccaagttgcatgaacaatccaatatgttaattcaggaacttcgtttaattaatgatcttacacagcggctgaacaagagtctgcatctttcggagatttatcaactatccgaacaagagttaaaggaaatattccaggctgaaacgtgttgcattcttcaactcaatgacagtacaaatgacttcgaagtcatgtcatctaacgtgaaagatgtttttcaccaatccttttctgtagactacggtatcgcaggtttggtctatcgaacagaggaaccgcttattatagccaattatgcgcaatttgataaagtgtcctcctttttcatggaagatactggatccatgtcactgattgcatcaccgatcagagtcaatggtgaagtgaagggtgccattttgctgggacacagtagagagcactacttttcatatgataactataggctcttgcagatgttatctattcatatcgggcttgccctgtcaaatgccacactgcatgccgaggttcggcgcttggctaatctggatatgttgacaggcctgtacgtgaggcattatctggacagtgtgattcacgagcgacaggctcatgaattctgtggctccctcattgtggtggatattgatcagttcaaacaggtgaatgacacattcggacaccagacgggggatcaagtattgaagcaagtgagtgagatcgtcaccagctctgttcgcttggaggatgtctgcgccagatggggtggagaagaactggcgatctatatgccacaggtgagtgtaaggcaggcgttagattatgcggaagtgattcgaaagagagtcgcagaagagaccagaccgcctgttacggtatccagtggcatcgcagagtggagttggatggatgaaaaggtcagtgtagagtccttgttttatcgggctgatatggctttgtacagcgccaagaatggtggtcggaacagaatcgttgtagaggaacaggaagtaacacgttaagagagaacaattccaattgcggagtcgttctctttttttgtgcatcgcagatcaagatgtgtatagaagaagtataagcgtatacgggcggggcaatctatggagaaagttcacggaagggtgaagatagacatgtttaatcgccattcggtacgtacattatggttatttgtgagcatcgtgattattggtgttccgggttgtggattaatgcagcgagatcaaacgcctgaggaggttttttccttggctttatcggggatagcgggaaaagaaacgttgagttttgaaggagaggcaggacttcgacgggagaacagtgggctgttcgagaatcagttcaagtttgaaggcaagctggagaatcatgatcgtctgacccttcagacccgcttacctggagaagtaactgctgtgggcacaggcattcaaacaactgccgtaaaaaataatggacagcccagtggatttagcgcctcttttgagcggaaacaagggcaatggatggcattgtcagcgcagcatgagccgctgcgtggttctctttctcgttttaacccaattgcccaattggagaagatcgatgggatgcacaaaaccattcaatctgagtatggggccggtcgtcgaaccagaacattacggattgaacttgcaccggaagacgccaaatcatgggctgtaacccagctaaacgacgagatgaacgccattcgggcagaatatatgcataaggcagctacggtgaaaggggcgcgtaaggagaagcttgagaaggatctggagaaagtttggaaacagggcgaaacaacgatgcaacagatgatgaaacaagcgagcgtgcagacggtatatcatctcacggtagatcggaagagcagtctgcctcttcgcttatcctctgaaagtcagatgagttacacggacaacaaccgtaaaagtaacaaagaagcccttgtcaccgatgtgaacttcaagtcatatcaataaacgaagtgagggactgcctactgacgggatgactgttcgcgtgctacaatagtatcgtaatttaccgttgttcaattcaagtatggcagatgacaggaggattttaccaagatgaaagacccaagaattcaaaagcttgcggcaaacctggtgggctattcagtagatgtacagcctggtgaaaatgtattggttgagatgattggatcggaacgtgatctgattaacgccattattgaagaggtaggcaaaaaaggtggtaacgtctttgtacagttgactgataaaaccgtacagcgtgcgatgctgaaaaatgccacagaagaaatgatgaaaacatgggcagagattgatctgaaccgtatgaaacagatggattgttatatcggtattcgtgcgggagaaaatgtgaatgatctgtccgatgtgccggaagaaaaaatgaaaatgtacaattcattgtactcccacccggtacatagtgaacaacgtgtcaaacatacgaaatgggttgtactgcgttaccctaacgcaagtatggcgcaactcgccaatacaagtacagaagcgttcgaagatttctacttcgacgtatgtaacctggattacgccaaaatggacaaagcgcaggactcgcttgctaacctgatgaagcggacggataaagttcgtatcaccggaccaggaacagagctgagcttctccattaaagatatcggtgcagagaaatgttctggccaaaaaaatatcccggatggcgaagtgtacagtgcccctgtgcgcaattccgtgaacggaacgattagttataactcgccaaccctgtacaatggagtgacttttgaaaatatcaagttcacgttcaaggatggcaaaattgttgaagcgacaagtaacgatacagagcgtttgaatgaaatcctgaattcggatgagggtgctcgtcatatcggtgaatttgcaattggatttaacccgcatattcttcatccgatgaaagacatcctgtttgatgagaaaatcgcaggcagcttacactttacgccaggtcaggcgtatgaagaaaccgacaatggcaaccgctcgtctatccactgggatctcgtattaatccagcgtccggattatggcggcggggagatttattttgacgatgtgctgattcgtaaagacggtatttttgtcattcctgagctggaatgcttgaatccggaccgtttgaagtaggaacaggattttgctgttgctaggaaagcggattcacggtatcatgtagtggtaattaatagatgataccaatagtaaaaagacggagggattcctatgtcgagtaataacgcggctgtagtagaaattgctcaaacagcaggcaagtttacttcttcaatcgtgcttcattcggagaacaagtatatcgatgtaaaaagtattctcggattgtttacaacgctgatcagcacgcacagctatgaactgcatgttcatggtccagatgcagttgaagcgaaagcagccatgtcagaagtatttgccaagcatggactgaatgtaagcatcgcatctgagtaatagctctcaagaagcacctttgccttttttggcaggggtgttttttggcatggaatgatctgaatactcgtctggacgtgactggaacaggtggattaagcttcaacaaaaggcttaactttgcgggcttattttggtcaggttcttgtattagctcttcatttcgtctaatattagaggtagaacgtctttacgcgatttttgggacataggggggaaaaatgcatgacttcatctgatctgcaggaccagctgagtttgaaagcgatcagtcttcttcaagaagatgcagataaaatacagaagcttattgaagtacagatggagaatctggctacccgctactgccctctctatgaggaagtattggatacacagatgtatgggttctccaaagaagttgattttgctgttcgtgcagggctccttccagaaggtgcaggtaagcagctggttagcgcgcttgagcggaatttggcaattttatatgaagccttgaacaagaagaatgagcaatagcctgcaaatgcgcgggtcagaatagaaggcatgcaggcgtttatgcatgctttttttgtgcgcctgaacgggactgggatgaaagccagccggaaggcgtatacaaacaaagagacagctccaaatgtatattggggctgcctcttgtggcttgtttattttaatcatggctacgtgagggcctggttacaccaggaagaaggatacaccgagtatgatatatacgacgagcaggagtaaaccttcgtaccaattcgttgaaccatcttgggtaatggacttcgcaataaatacggatacgccgatggcgaccagttcaatcgttgtgaatacgatatccatggttctgcctgtgaagtagctgacaaaaatcagcacaggagcaacgaatagtgcgatctgcaagctgctgccgaccgcaatttcaacggcggctccaattttatttttcatggcaagcatgatggctgcactgtgttcggccgcattaccgatgatggccacaaggaatgcaccgacaaacagttcgctaagtccaaattccgaagtgaagacttcaagcgtgccgaccagccattcactgacgaaggcaaccatgactgttgcgagcaccaggtagagaatagattttttcttggaccacgccggagcatgctcatgaggtagctcttcatcacgatcctcagtgacgtccgcaaggtagttcttatgcgttaccatggagaatagtaaccaggcgatatacgcgagaatgagcaatccggccacgatgagactaagtgtattggtgtctttctgtgtaatggaatgtgtattgagaaagactgccggaataaacagggcaatgatggcaacaatcatcagggaaccattcagacctgcgagtgaaacattataattctgaattttgaacttgagtcctccggcaaaaatacttaacccgagcactaacagcagatttccgatgatggaacctgtcagacttgctttgaccatgtcgaacagcccctctttgacgaggaaaatggcgatgatcaattcggcagcattgccgaaggtggcattcaagaatccacccagccgctgtccggcgtagtgggctacattttcggtggctttgcctaaaaaaccggccacaaaaataaccgaaatggctgatatcacgaactgtagaatcgaatcccatttcaagtagtgggcgatggcactgagtgcaaagaacgcaatcagcaaaatggatgaaatccggtttctcacaacaaacacctcggttataaattattttgttttgaattgcattgttaatcgcttatgagattattttcatatttcaatataaccaaatggtggtaggttgtaaacgcatctttttgagtttaatttgctttttggggtggaaaggatttaaaatacgagtaacgaagtgaaggaggatgtggcatggcagaacaacttcaactggagagcggaaacatccggattgccgatgacgtggttgcaaaaattgccggaatggctgcaatggaaacacccggaattgccgcaatgtctggaggattgtcagagggctgggcgaagcgactcagcggtaaaaacgtacagaaaggcgtgagcgttgaggtcggccagctggaagcagccattgacctgcgcatcatcgtcctgtacgaaaccccgattcatgaagtttcccgtatgcttcagcagaatgtaagagaagcggtagagaccatgaccggattacgcgtggttgaagtcaatgtaaaggtagaaggcgtatctttcaaaggcgacgatctgtagaaatcgcaatccgcaatggaggacagagcgatattgacctgttcttcatcttgatagacagagtttattcagtacacagaaaaaggctgcgcatccattgggtgcacagccttttttgtgttgcttttttatcgaatccgacgaatggactcccgtgaacgaagagcaggagaggtacgagtctgtgtctgtacagtcacggacttcgttttctcttccttgatcacgtccagattgttagtacgtgagatactgagcagaatgcccatggcaaccatcattacaaagagtgaggtacccccataactgataaatggaagcgtgacccccgtcaccggaatggtttgagttacaccaccgatgttgataaatgcctgaatcgcgattagtcccatgatacctatgccgaccaatgttccgaatggatcgggacagcggagagagacaataattccgcgccagatgaagtacaggtaaacaagcaggaataaggcacttccgatgaatccgagttcttccccgattacggagaaaataaagtcattatacgcatttggcaaatagtgcagcttcatcgtaccttgtccaattcccgaacctgtcatgccgccatcaccaatggcaacaagggaacggtagaggttaagacttcccccattaatatcggataatggattcaagaaagcttgaatacgtccgatcttgtagttctgctccgcagtgactgctgttgtagcagtcgttgtgtcggaaggagacatggaagaaaacagggaattcgctccaaacgccagtgccccaccgagtacaaccaggagaatcgaacccaggatatgtttcatactggctccaccggcatagatcaagagaccacaggtggacaccagaatgaaggtggtaccgaagtctggttgcagcataatcagccctgcgatgaatccaacgatgaacaagacgggaacgtaccctgtcttgaaaaccctgaatttctcaccttttttggtaataagagcagagagatagagaatgatagcaattttcgcgaactctgcaggctgaagactgaaaccaaaaatgtgaatccagcttcgtgcaccgttcaatactgcacctgagatcaaaacaatcaccagcatgaccgtagtgagcaggaaaaagggtgcatagagctttttgtacttgttgaagcggatattcatggcaaaaaacatgccaaatagaccgataatcgcccacataagttgttttttcgtgaagtaaagggcatcattgttaaatttatcgcttgcgattgcaatgctggaactggagctgaataccatcaccagtccaaagcccaccaacaataaagtgaggattagcagttgaaaatccggcgtgcctctcttcgttttcgtttgggccgtttgttgtttcatcgtttggcccagcctatgcttccagcagttctttaagctgctgtaatttttcggctgccagcttcacgactggttgcggaacggaagagtcataatccaggccgtgagggaaagtggctttgccgaggtatactgcttccacagcaagaacggtatccggtttttccaatttgccttccacagcgcgggtattaatgcgtacaaagtattctgagttggtttgttcatcttcaattttgtagtcatatgtagcacggtaatattcccattgccaccggacaaatccgactttctcggcgctctcatccaggtatgccaagtcgctcttcaagccatccaagcctgtattctcaaaaatcataagcgtttgatcctcctcataagcttccgagtataatttctcgagtatttctctagttcatgatagtatgtttccccttcccgtgcaagctttccaaaggcgtttcgtatcggttttcttccaattctgctacaatatacagcaataggtttgaagaggaaggttcgggcttgatccaagtcccgttcaagattgaaagggtggagagacatgactaataatatatggtgggaagatctgcagatccacatggtggaatggcggcgtcatcttcatcgcaatcccgaggtttcctttcatgaggagaagacatcctcttttgtagcggatatgttggagagctttggcgttgaagtgaggcgtcatgttggtggtcacggggtcatcggtaccattcgtggggacaagccgggtcctgtcgtcatgctgcgagctgatatggacgcacttccaattcaggatgaaaagaatatcgagtatgcatcacaacaagcaggagcgatgcatgcatgcggccacgatggtcatatctccatcttgctcggtacggcattgtatttcagtcgtcacaagaaggagatccaaggagagattcgctttttgttccagccagcagaagaactgcttccgggtggtgcagtccaggtcattgcggatggtgcgcttgaaggcgtggatgtcatatatggcattcatctgtggaccccgctgcctgtaggtgttgttgccagtaaggcaggaccgatgatggcggcggcggacgatttttacattgagatcaaaggcaaaggtggacatggcgggatgccacaatccacgatagatagtcttatagcgggttctgcgcttgtgatgcagcttcagaccgttgtcagtcgttcggttgatccattgcaacccgcggtgctgaccattggtacaatgcaggcgggctcggctcagaatgtaattgcagagcaatgcaaaatgagcggtacggtaagaacatttgatgaagagacccgaaacgggatgaaagagcgtgtgcttaccatggtagcccagacaggggcagcttacggagcagagacgcaagtgaaatatattatgggatatccgcctgtggtgaatgatgaacaagagacagcacgtttcttcagagaggctacagaattatttggggcagaacgagtgcaagcatccccgatgctgatgccagcggaagattttgcgtattatctgcagaaggttccagggtgctttatgtttgttggagcaggcaacccagataaaaatgcgatctatccgcatcatcatccgatgtttgattttgatgaagacgcaatgcagacggccgttagattgttcatagctatggctaagggttacacagccgaatgactttagatgcagttgggcatcctgttcataccgaggtatgggcaggatgtttttttgtggattttatagatgttgtccaaaagtccacttttcggtactgaaaactagactttttgaacgtgcacttaaagtggttcattttcggaagctgccggaactggacttttttttgataggaggaaggcagcaaatggaaggaacagaacatatggtaagcacagatgcttgtatcgttcagcgagattttacagttttgctggaagttggccaccccggattcgaaagagcaagagagcagcttgggatgtattcagaactagttaagacaccggcagcgttccatacttaccgaatcactccgttatcgctctggaatgcggctgcgctgggatggaatgcagatcaggtcatcgcaagtttggagctggtatcccgctggaacgtgcctgctgcacttatacaggatgttcggagaatcatggatcagtatggcaaattaaaactgcattccgaagcagatcacactagaatgcgtctttacagtgaggatgagcggttgctggatgaattaagtggattgaaatcgatagctgcctttcgcatggaacgtaaggacgctcatgaacttctgctcccaggagaacagcgagggttattaaaaagggaattaacacgattgggttaccccgtacttgattacgtaggatatcgggagggaaccaagctttcatttgattggcgctctaatgatccaggggaccactctgagcgatttgcgctgcgttcttaccagagagaggctgtggatgcattcgaaggcagtgagggcatgggaggaagtggtttactcgtacttccttgcggggcaggcaaaacggtcattggcatggccgttctggagcggcttcaatgtgaatgcttgattttgacgtccaatacaacgtctgtgcgacagtggattcaggaaattcaagacaaaaccacgattaccagcgaacagattggtgagtattcaggtcagaaaaaacaggtgaaacctgtgactgtagctacatatcagattcttacacaccggaaatcaaaggatgctgattttacccatatcaaactgctcagtgagcggcaatgggggctgatcatatatgatgaagtacatttgctgccagcacctgtatttcgtgcaactgcggatattcaagctacgcgaagactgggattgacggccaccttggttcgagaggatggttgtgaacaggatgtgttttcgctgattggtccaaagctctatgatatgccgtggaaacaactggagcagcaagggtggattgctgatgtacaatgtcaggagatacgtatcccgttttccccggaactaagatcaaattatctgcaagccgaggttaaacatcaattccgattggctgccgagaatccggcaaaggtacgtgtagtgaagcgtttgctggaacgtcatcgggatttgcctgcgctagtgattggacaatatctggatcaacttgagttgattgcccgggaaattgaagcacctttgatctcgggtaacatgtcacagcaagagcgaatcaagtggtttgccgcttttcgacgtggagagattaaaacaattgtggtatccaaggttgccaattttgctgtggatttgcctgatgctgctgttgcgcttgagatatccggaagtttcgggtcaaggcaggaagaggcacagcgtttgggaagaattttgagaccaaaagctggagaaaacaaagcatatttctatgcgttggtatcagaggatagtaaggaacaggagtttgcattaaaccgtcagatgttcttggtcgagcagggatatgaatatgccatcgttcatgagaacgaatagtccatttatactcgcgaaaagaggagggattgggatatgtcttcatttgaaccaatagatgagccgttggtactgaaccttgattcatggtcaaagcttgcttcggtggaacaaaaagtgcttggtgcaatttttcacaaacatgccggtcagcctttttcctccctcctgccgcgagaacagtgggccatcgaaggactaagtgtcgcagaagccaattcttcatttgccaaccttaggcagcaaggatggattgaatctgtatataagagttggggggagcgattattctatattcctgcttcgctgatggagacattgacgattgcttacgcacaaagagtgggtataaccgttaaacagatggcacagcatgctcatgtattacaggaaggaaagccggatattgctgcagagctgcttcatctgatcgcgtggattgaaagagaaggacttcctttgacaggtaaaggtacgatacataagagaacggttcaaaaattaagtgcaataacagtactagccgctacagactttgatggtttgggcatccgatatgaacattcggatttgtatccgacccacgtagcgatccttctggatctactgctcagtctgaatctcattcagaagtcagatagccaaattcagattgtagatcatcgattacaaacatggttgaagctctcgtggagacagatgcatcgggaggtatatcaagcgtgtatggacagatacggagaagctgaacccgcgttgcagcatttccgttatcaattggcagtgtttgctccagaaaaaaacatatggtgccatatagagaattcggaattgaacccacgtatcaggggctggctctgcgcactagctggctggggttatggcgacatcggagaagatcagtcgggagcgctggcattccgttggctgattgaaccgcagagcctgttatatcgagaacaagagatggtaagtgagacggagccatgtggattttacatgcagcctgattttgaaatgttggtgcctctggaagcagggcctgatttgatctggatgctggagcaatacgcagaacgggtgacgcgtgatcgaatgtccatctaccgtatgacaagagaacgattcatttcagccttaaccagagggtatggattacatgaagtgatggattttctggaccaatatgcgctgacaggcataccggaaaatgtacggattgcgttagcagattggggaaaggagacggatgccgcaccgttgactgtaaatcggagtatgaaggtaatggaggtaagtagaggctccgcagatgattcgaagttattagaaaaagatatgttgagcggtgtatattcttctttctacacatccaataatcaaggtctggttgatgtccctgcatctctgcatgggttggagcgtgatcattctgtcattgagaagaagttctctctgttgggatttgaggagataccggagacctggtacaaggagtggcgtcgatatcatagttcaaccgcccgacagattgctgccaaagccattgagtggcagaccaagctggggatacaacaggaaaatcgtacgcaatacctcattccacatcaggtagagggtcatgaacaatggactttaagcggttggtgcatgttggattcaagtgaaaatagatcggagacggaatggcgtacattctccccgtcagagtgggatacaatgcgtcttatcctgccagatgatgtcataacctgactatttcacgtgaatatcaggttgaaaggcgaattttcgagttccccctatttctaattgcaggaaaaactcttcttaactattcatggatatgctatgatgaggtagtctacgttaagtagaactttatatatagataggatgaatatttcatgagcgtagcggaaatgaacacggtcgatatggcccaagtgttaacgggcgcatatgaactgggcgacatgattaaccaatctgccgaagtatcggattatttatattggaagcagcaagtcgagactactcctgagattcagatggggattcggaagctgaatgccaagaaggaattgtttgaagaaacacagcgtttcggtcattttcacccggattatcatgcagcaaaagaccaggtgaaggctctggaacaggagttggaaaatttcgaggcggtaatccgcttcaaacaggcagagaagtccctggatgatatgttattccagatgtcagagaccattgcatttgcagtgtcaacgaccattaaggtaccgagcaatgatccgaatccgaagggcggctgcggtagtggcggcaagtgtggttgcagttaagtaatcattatagaagggcggggaacgatgatgtttgcggaaaggacaggattcattatttgggtcagtgatttgaaagctgcccgtaatctcgaaaaatatggcaccgtgcattatatctcccgccgtatgcattatgtagtcatgtatgttaatgcagaacgggcagatgatacgatgaaaaatgtgaagcgactttcctatgtgcgcaagatcgagcgctcgtatcgtaatgagatcaaaaccgagtatgccagcaaaacgatggacaaaacgagcttttacggaatatagacgagaaactggagggaccctttggggtcgctcttttcttgaattatacacaaattggatattgtgaaaaaaagttaaacttacgccttgaggttgcgggactaatgttgtaatatatttggtaataaatagatagaaagtcctatctggtggagagtgattcccatgcgtgataaggtgatgcaacgttggagcacctacgagccgtttttcgtggctcttggagacaagaaagtggctgacatcgtcattacccatcatgccaagatgcggtatgcagaccgtattgagcctgcacgtagtgatgatgaccatattgcggcgtggttatgggagtgtctgaagcaggaccgtataacaccatactaccgtaatgaacaggacgtctacctgattgatgaggatctggtggtggtcgccgaattttccgaacttgaaggagaatatgatattgcgggcaacccgctgcacaaaatgattgtagttacgtttctgggacgtatgtcggagaccattgaattaagggacctgaagtcatattattcatggttaagacattcaagaagaatgacgttggtcaaaaatagccgcaagcataagtaagcccgagtagattcaatatgttgaaatcatagattcaaggattatcgcatgcagacaagctgcatgctttttttgttgccaagcgggaaatcggctacaatgtagagagtgtaatcgaagaggggcgaagatatgaattttcaccaattgcatattttttatacggtagcagagaaggggagtttctcggctgctgcacaagcattacatatgactcaaccggcagtaacgatgcagattcaatcattggaggactattttggcaccaagttactgcatcgttccaccaaaaaaatagaattatccgaggctggacggactttattacctcatgcgaaacggagtgtagagctggtcagacagacggatgaagcgatgtcggcgtttacccagatgttacagggcagactccagctgggagccagcttaacgatcggggaatatgtgcttccacgcatgctcggaccatttgcacttcaatatccggatatttcaatcgtcatgaaagtgatgaatacaacgcaaattatggatgacatattgaagcatcagctaaacttcggtcttattgaagcgcctgtgaaccacccggacatgattgtggagcctgtcatgcaggacgagctgaaactgattgtacctgccgggcatgatctggcgaagcgtggcaaagtgaatcttgaagatgtaatgaattatccttttgtgctgcgtgagaagggttcgggtactcgtcaggtgatggaagaccaattgcaaaagaaaaagattgatccgcaggatatgaatgttgtaatggaacttggcagtacaggagcggtaaaatcggctgtggaggcaggggtaggtattacgatgttatctccttcttcggtgcagcatgaactggctttgggacttgttcatattgtggatatccgcggactcgaattcaaaaggcagttctatgccatccatctaaagtcgtccttgttgcccctgtcagcagtcgctttcctgaattatctgcgtcagcaggagcagcctaagtcggtacataagacggggaaggcataatcgttggcaacatcaatgatagataagattgaatcataatcaattttacacaaaggagctgttgttcatggatcagcgccaaggacgctgtgatcttcacacgcatagtcaggcttccgatggaatgcagccacctgctgataatgtgaagcttgccaaacaaaaagggctatctgcggttgccctaacggaccatgatacagtagctggtgtagccgaagcacaacaagcgggaaaagagtacgatattgatgtcgttgctggagtggagatcagcactcgggctggtgggaaagatattcatgtgcttgggtattatgtgaatacagaggatgagcagttcctgcaacggttgcgcggattacgagaagcgcgagatgagcggaatcatctgattattggcaagctgcaagaactcgggcttgatataagctggcaggaggtactcgatgagctgggacggccgttagagccggatgagagtattggaagacctcatatggccgatgtgctggtgaaaaaaggctacgctgttgacatgcgggatgcatttgatcggtatcttgctgaaggcaagccaggctttgtatctgtaccccgcgttgcaccagaggatgcatgcgagtggatcagagccgcaggtggagccgctgtgattgcccatccgggtctctataacgatgatgaactggtgcgacgtatcatcgaagactctcgtccagatggcattgaggtgtttcattcggaccatggcccggaagaggaacgcaggtatggtaagctggccaaggaatacgacctcattgaaacaggtggatctgattatcatggtaaacggcaaggtattgttttccacggggatcttggtagcaagaccgtaacggttgatgtgttggaaaggctgaaggcagctgcttcacagcaaaggggagagtaagcgagacgttgcaacgctctatctgactataataaattctgtattactggatacattttaagatcgaaggagtaagagacatgcaagcatgatagggctgaaccttcatgtttgcatgtccctttttttgttctgaaaatagtctatgtaatggaatagtttacccaagcgccacgtgtagccccgagacgttcgaataattgctgtgcccgctcattggtcactgctgtgatccaagacatatatgcacatccatggtcacgcgtatattgctgacagtgtgcaaataatttggcttctgcttcgccttctctgaatgtttccgtaacaaataggtcattcatgatggcgacacgctctgctttcatcgtgctgtatgtaaagaacagggtagaaaatccgataagcttcccgtcctcttctgccacgaattgagcaccgatctgctgattaagcaggttgttgatcaaaagctggatggattgatcaccaggccaggggttgttgtagaatcccaccacatagtcatgcattaaggccatcaggggtttcagatcattaggttgagtttctctgatatgtatggtcatggtacacttccttaacagtaatttatatttcttagaattgaattattatacatataaatgaattaatattcaataaaatgataaataagctgagcttcacctatcactcaaacaactaatgcaataacaaaaatcccctgaaccgttaatggtcaggggatttttctattgttactgttacatcgcaccttatgagctaagcatactatccatttttaatggtggatggcagactcttgatcaattcatcatttggcgtgacaaacaacgtcttctgatgatcatagatcacaaaaccaggcttcgcaccacttggtttgcgcacatgacggataaacgtgtaatccacaggcacactgctggactccttggcctggctgaaataggcagcaagctgtgctgcttcttccaatgtagcttcaccaaagtccgtactgcgaataacgacatgtgaacctggaatgtctttggtatgcaaccaggtgtcgttggaagaagcgagacggttggtcacgtactcattctgcaggttgtttttgcccacaagaatatcaattccctccgaggaggtgaactggtgtacggttggacggtcacttttcttcttctttttaccctttttattacggtcacgaaggtatccttgctgtacaagctcgtcccgtatttcctcaatatcgttcatcgatgcaatggagagctgctgtaacaggttatcgaggtagtcaatctcgtctttggtttttccaagctgctcatgaataacagccagactgttcttatatttgttataacgcttgaaataacgttgtgcgttgtcagacggtgtgagcaacggatcaagctgaatggtaatgttggcttggtcttcatcgtagaagttcacaagctccacgctcttgtcccctttgtggacctgatgcagggaggcaaacagcaactcaccccatagtctgaacttgtccgcatcgtctgcttccagtagatccttgttcaggttgtccagctttttgatgtttttgcttcgctcattctgcagaaaacggagcagatcacttactctctgtttaaccgtgtctcgttcagccttatctccgtaataatcttccatgcacttgctcatcgtgtcataggttttctccaaatcctgaatgctctgaagatgaacggctgagaaaatcattttgcctttggcgttcattccggttacaggtgtgtagatatgatctctgacaggtcccatcacggcttcaaaagcgttccagagtgcaccagcctcaactcggctttcaccctcaaccacagctggagtgctcacggtgccttcagcagcaattccacgagcagcaatctctcccgcaattaacgggctaagaccgctaaaggagttcacaagccagcgtgatgcatcttcttcagcggcatgatagctgtcctcgaaagctgtacgactcacttcgagcggattacttttatgttgctcgggtggggcagtatacgcgaatccaggcatgattacccggtagctactgattgaaggagtcacatgatgaatgccatccagaatcgttccagttacaggatcaagcaaaataatattactgtgacgccccatcaattcaatgatgatccgtttaaccgaaacatcccccagttcgtcgcgctggcgcacattgatgtggataatacgctccataccaatctgacggatctcctcaatgattgcaccttcacagtgcttacggagcaacatgcagaacatgggtgcttccgtagggttaaggaatgtcttttccgtataatgcacacggggataggttgggcttgccgaaacaagcaatttactatttccgcgctgagcacgcagggtgagaactacgtcatggccattcggctgatggatcttgctgatacgtccaccaatgcagccttgcagttcatgaacaatggcccgtgtcacaatgccgtccaatgccattttttccacttcctctctctatcgagcatctgcatttatcatgccaaatgcttcatctatataactgaaacgtgcaaccaggtatgtaaaaaaacaaggactggctacagattcttcgttgcttgcctgttgaacgctggaattggtactgcgcagaacatcgcagacttttattttagcctattctgtccatcagggaaaggattcaccttccgggtgctaatcacagacctgtccgaatacatatagagcaggtagtttgtccggcatagtgtacagcctgtcgaccagcgcgccggtgagtcatgtgagcttattttgcagatgaaatacagactgggagggaaacttgaagcatggaacataccaagtggcatcaacttagtgatgaagagcttcgtaacactcttggcgtcagcccgcaggaaggattgacggatgaagctgtagcagagaagaggaaagtggtcggttcaaatgagctgagcgagggaaaacgtatttctccaattacattgctcttgaatcagttcaaggattttatggtgctggtgttgatgggagcaacgttggtatccggattgctgggtgagtatctggatgcggtaacgattgtggctattatcgtactgaatgcgattctggggtttgtacaggaattccgggctgaacgatctcttcgtgcattgaaacagttgtctgcacctcttgccaaagtgcttcgttcaggccaggaagtacaccttgccgccaaacaacttgtccccggggatattattatggtggagagtggggaccgcatacccgctgatgtgcgttggctgcaaacgaacagtctggatgtcgaggagtcggcacttaccggggaatcggttcctgtaagcaaacactgccttccgattgcggacgaggacgttccgctgggtgatcagaagaatattggttttatgggtaccatggtcactcgtggtacagccaaaggtgtggttatccgtacggggatggagacggagatgggcaaaatcgccgatctgatccaaaatacggaggagcaagaaacaccgttacagcacaggctggaacaactgggcaaaattctgatttttgtcgcattgggattaactgttatggttgtcgtcgcagggatactgcacggacaaccagcggttggcatgtttctggcaggggtcagcctcgcggtggctgccataccggagggtctgcccgctattgtaaccattgcacttgcactaggcgtgcagcgtatgatcaaacgtaaagccattgtgcgcaaactgccttctgtcgaaactctgggctgtgcatccgtaatctgttcggataagacaggcacgctcacccagaacaagatgacggtaacggatgtgtggctggaaggacgcaacatcaaggttaccggggatggttatgcacctgaagggcagatgttggagaacggtcgaatggtggaattgaagagtgaccagtcgctacgcagaatgctccagattagcgcgctttgcaacaatgccagtattgtggagagtgttgcaagcgaggtggggagcaagaaaaagggcaaggataccaaaaaggaaagcaagaaaaacacgaaaaaggatggtttcaaagaagaaacagttcaacgagacaatgtattctgggagctgaaaggtgatccaacggaaggggcacttgtcacactggcctccaaaatggggcttactccgaccggactcaaagagttgtatgcccgccagcaggagttcccgtttgattcggagcgaaaacgcatgtcggtcctggttcatcaccagggaggccggatgatttataccaaaggtgcaccggatgtgttgatcggacactgcagttatattttgtgggaaggaaaggtcgtacctttcactggaacgctgcggcaaaaagtgatggcagccaacgagagcatggccggagcggcactgcgtgtccttggaatggcctaccgtgaagtgcggccggaagaaaaagtggctgacgaacacgccgccgaaagtcagcttgtcttcgtaggacttgcaggtatgattgatccaccgcgtcgggaagtgcgagatgcaattgccacatgccgcaaagcgggcattcgtaccgtcatgatcacaggtgatcatggaacaacggcagaagccattgcgcatcagttggggattcttcctcgtggaggtgcctccttaagtggtcagcagctggcaggcatgacagacgatcaactggataaacaggtagagggcatatatgtgttctcaagagtgtctcctgaacataagcttcgcatcgtaaaatcgttacagcgcaaagggcatgtcgtcgcgatgacgggtgatggagtcaatgatgctccggcgatcaaagctgcagatatcggcatagcgatgggcattacaggaacggatgtgacgaaggaagcttctgcgctcatcctgagtgatgacaacttctcaaccattgtggctgcgattgaagaaggccgtaatatttatgagaacattcgcaagtttatccgttatttgctggcatcaaacgtgggcgaaatattgacgatgttctttgcgatgatgatgggcttgccgctgccactcgtacctattcagattctgtgggttaacctcgtaacagatggcttgcctgcaatggcgctgggggtagatcagcctgagaaagatctgatggaacacaaaccccgtggcgccaaggaaaacatttttgctcgcagactggggtggaaaatcgtcagccggggtgtgttgattgggttatgcacactcggagcgttctggcttacccttcaggctgcgccggataatccgggtcaactgatcaaggcacagtctgttgcttttgctacactcgttttggcgcagcttattcatgtctttgattgccgtagttcgcggtccatcttccaccggaatcctttacagaacaaatatctggttcttgcggtgatttcatcggttgtactgatgctggttgtcatgtacgttgaaccattgcagccgatcttcaaaaccgtacctctgggattgcgtgaatgggcgctctgtatcgttgctgcaggcattccaacgttccttatgggcgcaggcagcgtctggggtggtcgtcgtaaccgccgccgtatgggtggtactggccgcttcgtaccgaaaagtacaaagttttcggcataaaatcaataccttttccttacctatttcgttatgctatcctcaaaatgattcaaagcggcagctttggcattttgcaggatagcttttttgtgtaaatgttgaatatgaatttctatggtaatcctgtagaagagcaagaatatagctttggcagcagactgccaaaaggagtgggcaagattatggaatttacgaaaatgcatggacttggtaacgattttatcgttgtatttggtgaaaaggagcttccggcagatgcggcagaattggctgtgaaatggtgcaaccgtttctttggcatcggtgcggacggcctggtttatatactgccttcggagaaggcagactttcagatgcgtatcatgaattcggacggttcggaagcagagcagtgcggtaatgccattcgctgtgtatccaaatatgtatacgatcatggtcacgtgaaccaggagcagatcaccattgaaacgattggtgcaggggtacaacctgtgagtctcaacattcgtgatggtaaagtggaaactgttcgtgtcgatatgggcgagccgatcctgaacggtcttcaagtgcctacaacggtggatgccaacccagtggttgatcactacattgaagcaaatggacatgcgttcaaattcactgccgtatccatgggtaacccgcatgcggttatctatgtagatgacgctgtaaattttgacctcacaacttgggggccccttcttgaagttcatccgatgtttccaaaaaaaatcaatgtggaatttgccacagttcgtgaccgtggatatgtggacatgcgtgtatgggaacgcggagcgggtccaacacttgcttgtggaaccggagcttgtgcgacactggtatcctctgtcctgaatggacatacagatcgtacagcagtcatcagcctcaagggtggggatctccacattgagtggaacgaagctgacaatcatgtgtacatgactggacctgctgaagttgtttttaaaggaatcacttcataaagaagtggaaggtttaaccaaagaggcctgcgggcctctttttttgtcaaaaaggacaggtcgtgtctcctgtacagagacatattgggggctgtatggcaagaacgtccatatgagctggatactcatcaaaaacctgtgtttttcttcgttttatagcgttttttgtgttacattagtatgtaaatgatcacagctaggcggggggaaatgggatgaaggcggatttgcggaaagttatgcaggaacgggttctcgttggagatggggccatgggaacatttctgtaccaaatggggttcccggtggggatttcatatgaagaattaaacttgatttcacctgaagtagtggcggatgtacatcgcagttatcgggatgcaggtacagaaatatttgaaacaaatacgtattctgccaattacgacaagttgtccaagttcggtctggagtccaaggtggaggacgtgaaccgtgccggtgtacgcattgccaaagaggtagctggagataccggttatgtgcttggtgcagttggttccattcgaggtggcaagcggacaaacgtgtcaacgagtgaactgaaacgcttttatcaacaacagatctctgcactgctagatgaaggcgtggatggcattttgcttgagaccttctatgatatcgaggaaatggatattgctcttttgcaagcgcgcaagctaagtgatctgcccgtaattggacagttcgcggtagaggatgttggacacacactggacggatatacaatgcctgaagccttccggattatgcgggagcagggcgcggatgtcattggttttaactgtcgctcaggtccaaacgggattatgcgtgccatggaaaccgtctcgggacgaattggtattccaatgtccgtctacccgaatgctggtgcagcagattatgtagatggtgagttccgttatggtgcgactccggagtactttggtcagacggcagtgcaatttgctgaactgggcgctcgtattatcggtggttgctgtggtacgacacctgatcatatcaccgctatgaaagaagcgcttgctgactatgtgccttcgcctattctggagcctgatccgtcagaatccaaaccgcgtattgtgttgcatgaaaatgtggatgagcgttccggacgtggcggacagcctacgatcgttgacctggtcaagcatcgtcacaccgttattgttgaacttgacccgccgcgggacttggacattgccaagttcatgaaaggtgccgagacattaaaagcagccggagccgatgccctgacactggccgataattcactagcggttacacggatgagcaacatggcgctgggtcacctcgttcaggatcgcacgggccttcgtccactggtgcatattgcctgccgtgaccggaatctgattggaacgcagtcccacatgatggggtttgatgctttgagtattaatcatgtactggctgtaacaggagatcctgcaaggtttggtgatctgcctggttcaagctcggtatacgatctgacttcttttgaaatcatacgcatgatcaaacagttgaacgatggagtggctttctcaggtaaaccgctgaagcaaaaagctggttttgtcatcggagcggcatttaatcccaatgtgaaatatttggaaaaagctgtacaacgtctggagaagaaaattgcctctggcgctgattacatcatgacacaaccgatctatgatcctgagttgattgtagcaatgcacgaagcgaccaaacatctggatgtgcccatttttgtaggtgtaatgccgctagcgagtggacggaatgcagagtatctgcacaacgaggttcccggaattcagctttcggatgaagtgcgttcccgtatggccggtctggaaggcgaagaaggccgtgcgatgggagtaaaaattgccaaagaactgctggacgtagcaacagcgcatttcaaaggcatctatctcatgacaccgtttatgttctacggaatgacggccgaactgactcaatacgtatgggagaagtcggagcatcaatgtcctacttgtttcaaccctaataatcaattacaatagtaaaacggatgtgatgccgatgtcattcagtatgaccggatacggtcaatccgcctttcattttggcggctataaggtacaattagagatcaaatctgttaatcatcgttattgcgaagtgatgatgcgtctgccaagagagtggacgtattatgaagacggtttgaggaagatcgtacagagtcgtttgaaacgtgggcggattgatgtttatgtaatgaaagaaaaagaggaagaccaggctcttcccgctgttctgaatgaacagacggtcagggcctatctgcaggctgcagagcaactggagacccaatatggaatgcagggcaaaccaagtattgtggatatgcttggtctgccggacgtcatggttcattcggatgggacaagttccattcccgaagagcagaaggacgaatgggagcgagttctgcaggaaggattgaaagaggctctgtccagccttgaacagatgcgcgctcgcgagggtcttcatctggccagtgatctggaacggcggattacccgtctggagtcactgcataccgaaatgcttgatcttgcaccgactgtggtaagtgattatcgcaacaagctaagacaaaggcttacggaaatgcaggaagaaggctctttcccttttgatgagcataaattgggtatggaaattgcaatgtttgccgatcgttctaacatagaagaggagcttacgcgtctacagagtcactttggacagagcagggaactgctgaagagtgatgagcccgtaggtcgtaagttggactttctaattcaagagatgaatcgggaagtcaatacgattggatcaaaagccaaccatttggctctggtgaatcgtgttgtcgagatgaaggcggagctggagaagattcgtgagcaagcggcgaatatcgaatgaacggccacatttcggcaaaagagtcgcatgtatagggggaagaacctgattatggcaatcaaactcattaacattggattcggtaacatcgtatcggcgaaccggattatatccatcgtgagtccggaatcggcgccgatcaagagaattatacaagaggcaagagatcgtcacatgctgattgatgcaacgtacggaagacgtactcgtgccgtaattattacggatagcgatcatgtcattttgtctgcagttcagcctgagacggtcgcccatcgtctttcttcgaaagatgatgataacgacgaataaaatggagtgtaatatgtctaagggattactggtagtgttgtccggcccatctggggtcgggaagggtactgtatgtagcgctttgcgcaaacgggtgccggaattgatctattccgtatcggcaacaacccgtcagcctcgtcttggtgaagaacatggtgtgaactatttcttcagaagtcatgaagagttccagaacatgattgctgaagatcaattgttggaacatgcggagtatgttggtaattattacggaacaccgcgtgattttgtggagaaaacgattaacgaaggccgcgacatcattctggagattgaggttcaaggcgcgttaaaagtgaaagagaaattcccggaaggcatctttgttttcctgcttcctccttcattggacgagctgaaagatcgcattcagggccgtggtaccgaaagccaagcgaccattgatcaccggatgtccgtggcggttgatgagatcagtctgctggagcagtatgattacgctgttgttaatgatgaaattgatttggcgtgcaagagaatagaaagcatcataatcgccgaacattgtaagatcaataaataatctcttttgccgctgcagaatgcgatataagtggggcagttgtcatatcatatactgaagcactccatctcggaatgcccgggtgtgaagacatgccacatcagttctgtcaggcggcaacttgtgattatactaatgcgaagaggtgtttgttaatatgctgtatccttctattgatgaaatgatgaacaaagtcgacagcaagtattcccttgttgttgctgcttcccgccgggctagacagctacgtgaaggtgaaaaaacggatttaagaggtgcgagatcccataaacaagttggcgttgcactggaagaaatctatggagacctgctcgttgtcatcaaaggacaggacgaagaagaagagtaagccgcctgcggctgctcttcaactgcatacggcgtaagccggattaattgacaaccgcgaggttgttatttttttacgaataagcatattttaacggaatcttctttagacgtcgtataaatatcgggggaaataaacatgttgaacggtaaaaaaatcgtgcttggtgtgactggcggcatagccgcttacaaagcggcaacattatgcagcagactggtgcaaaagggagcggatgttcatgtgattatgacagcttccgctacacagtttattaccgaattgacgctgcaaacgttgacccgaaacaccgtatataccgatacatttgatgagcgtgaaccggcagtcgtatctcatattcatctggccgatctggcggatcttgttctggttgctccggcaacagccaatgtaattgccaagatggcgcatggcatggcagatgatatgctctcaacaactcttcttgccacgacagcccctgtcatgattgctccagcgatgaatgtacatatgtatgatcatccagctgtaaagcataatatgaacctgcttgttgaacggggcgccatgatgatcgaaccgggtgaaggtctgcttgcgtgtggatatgtgggcaagggacgtctggaagaaccggagagcattgtggatgtggtagaacgtttctttgaacagcaagaatctgcagacattagtcggcagggacaagcttcattgttacaaggcaagaaggttgtcgttacggctggaggtacgattgagcgcattgatccagtacgatacattacgaacgattcatctggcaaaatgggatttgccatagccgcagctgcgcgtgatctgggggcagatgtgaaattggttatgggcagtacccaagccaagccaccggagaatgttgagttgatccctgtacagtctgcacaggatatgtatgaagcggtaacacgcgaatgggacgatgctgatatcgtggttaaggcggcggcagttgccgattatcgtccaaaggaagtttataccgagaagatcaagaagaaaggcgacacgctgtcgctcgaacttattaaaaatatagatattcttgaaacactgggcaaacagaaaacccatcagtttttgattggttttgctgcggagactcagtcagttgagatgtatgcacgtgagaaattggaacggaaaaactgtgatctgatcgtagccaatgatgtaacccgcacgggtgcaggatttggaacagacaccaacgcggtacatatctatgaccgggaaggtttggtggaggagcttccagtgatggccaaggacgatgtggctcatcggttgctccagattgcggcggagcgcattgccgggaggaattaggatatggagattgccaaggtcatagtcgatgttcccgtgaaggaaacagatcggccgtttgattacctggtacctgaatcgatgagagaatggatcgagattggcagccgggtgggtgtgccttttggtcatcggacggtgcagggattcgtgattgatcttgtgccgcgtaccggagaggaaacattcaagcttaagcagattcaggagttactggacattgttcccccgttgtcaaaggatttggttgagttggccgaatggatgagtggacgttatgccagtaaccggattttgtcattgcaggtcatggtgccgacggcattgaaagggaaagcagagcgatacatctcgctgggagatgcacttgatggacagatggcgggtgcacaaccggatgatgaggtgttatttgtttggggagaagagtctacgactgagaaagtacagcaggatatcatccgttttgtcaaaagtcggggtcaggtaccgctgcaacaactgagtcgaaaatatcccaatcatgctgcactaattaagaaattattgcttggtggtgtgctgctggaaagtcaggccatcaaggacaagttaaataaaaaaacgatgaagtctgttgatctggctgtagatattgctgctgctcaggaagcacttgcttcattcccggcgaaagcacagcggcagaaggagattctggcttttttgctggaaatgaaagaactgctgcccatgccgatgaaagaagtgttatctacactacaggtatcggctgcaacgattaaagggcttgaggaaaagggattgattgtcaccgaggacgttgaggtcttccgtgacccttatcagggcaggacgttcaaagcgactgaaccgctggttctgaccgatgagcaaaaacttgtctacgacaatatcaatggccgattgcaggaacaacgccatggggtgtttttgttacatggtgttacgggaagtggcaagacggaagtctatcttcaaaccattcaacaatgcatcgaacaggatcggcaggctatcgtactggtgcccgagattgcactcacaccacagatggtagaacgttttaaagggcgatttggggaccaagttgctgttatgcacagtcgtctgtctggcggtgaacgttatgatgaatggcgcaagattcgtgagggtcaggtaaaggttgcaattggggcacgttcagctgtatttgctccattcagtcggcttgggttgatcattatggatgaagaacacgagacttcctacaaacaggaggaaactccgaaatatcatgctcgtgatgtagcggtaaaaagagcgcagcagcatcaggcggtggttattctgggttcagcgacaccttcgctggaaagttattatgcagcacgctcgcagagtaatgatgattttgcaccactcttgctggagatgccaacgcgggcactgggtaacaagctgcctgaagtgcggatcgttgatatgcgtgaagagttgaaggatggcaaccgctccatgttcagcagggctttgcacaaagggctggaggaacgcttggaacgtggtgaacagacggtgctcctgctgaatcgccgtggatattcgacctttgttatgtgccgaagttgtggatatgtggcaggttgtcctgaatgtgatatttcattgacatatcatcagcgctcgaataatctccgttgtcattactgcgggtacgcggaagcggctccggaagtgtgtccggactgtggaagtgagcatattcgatactttggtacaggtacacagcgagtcgaggaagagcttgccaagctcttcccgggtattcgggtcattcggatggatgtggatacaacaacggaaaaaggggctcacgagaagctactgaaacagtttcgtgagaaaaaggcggatgtattgctgggcacccagatggttgcgaagggtcttgatttcccggatgtaaccctggttggcgtgataacagcggactcagcgttgaatttacctgatttccgtgctgcggaaaaaacgtttcagttgctaacacaggtagctggccgagcgggtcggcaccaattgcctggtgaggtgtttgttcagtcctatacgccggaacactactccattggccatgcgagtcagcatgactatgtgtcgtttgtacgtgaggaattgctgcaccgtcgcaatttgcaatatccgccatactgtcgcctgattctggtgaccttttcgcatgagcaacttccggtattgattcgtcttgccgagaactatacgcgaatactgaaagagaaggctaatgcggctggatggctcggcagtctggatcgattcagcaatgatgcctttgatgtactggggccggtagcgtctccgattcctcggatcaagaatagatacagattccaatgtatgataaaatggcggggggatgtagacgccataggactcgctctggctacggcccggcgcatggacgatgatgttcaggcgcaaaaattgcttattagtctggatgtagacccgcaaatgttaatgtaagcattttgcagcaatgcggatgtaaacaagcggtataaacatagattaaaatgaataccccaaaaatacagatatcgtcctgaaattatgatgaggattaggaaggtgcttacaacatgtcgattcgcattatcgtgcaagaaccagatgaggtgctccacaagagagccaaagaagtaaccaaaattacaccaaatgtacaaaaattgctggatgatatggctgataccatgtacgatgcggaaggtgtgggtcttgctgcgccacaggtcggtattttgaaacgtctgattgttatcgacgcaggtgatgagcaagggctgatcaagatgattaacccggagatcattgcaagtgagggagaacaatttggacctgaaggttgtctgagtatccctggaattaatggtgatgttcgccgtttcgagaccgttacagttaaaggtctggatcgtgaaggtaaagagctgattattacgggtagtggcttgctgtcccgtgcattccagcatgagattgatcatctggatggcgtactctttacggatgtcgccgagaaagtgtacgaaattgcagccgatcaaacgggaccgcgtcgtaattaaggagtgatcgatttgaatattgtttttatgggaacacctgaatttgcagtgccttctctcgatatgctgatggcagagggatacaatgtggtgggtgtggtgactcaacctgataaaccacagggacgcaaaaaagtacttacgccaacaccggttaaggccgcggcagaacgccacggtctgccggtgtttcaacctgttaaattgcgtgatccggaagcggtagcccgcttggctgaatggaagccggatctgatcgtaactgcggcctttggacagattctgcccaaagctgtgctggatatgcctgttcgcggttgtgtgaacgtgcatggctctcttttaccgaaatatcggggaggagcaccgattcaacgttccattattaacggggaagccgtgacaggagtcacattgatgtatatggctgaaggcttggacaccggagatatgatctcgcgtgtggaactgccaattacggatgaagatacatcaggatcgatgtttgataaattaagtgaggctggttccaaactgcttcaggcagaaatgccacgattgattgcaggcgagacaacagcggtccctcaggatgatgccgaggcttcatatgctcgcaatctgactcgggatgacgagaaaatggactggagtcgtacttcacgtgaactgttcaatcagattcgtggtcttgtgccgttctccggtgcatttacgatgtgggatgatcaggtcttcaaagtctgggctgcggctaatcccgatcaggtggacctggcaacttcttcggatgctggacaagcagagcctggaacggtgctgcaattgaacaaggcagggattgaagtccgcacaggcaatgggtctctctggttgactgaagtgcagccagcaggtaaaaaggtgatgcaggccgctgactttgctcgtggtggtacactgaaaactggaacggtgctgcgatgagcggtaacatactaggtcgttcgtcaggaaaaggccagaaagctaatggaaattcatccggacgtgaaggaaaccgtcgtccgaattcgggtaaatcgggtggtgcatcgcgctcccagcaacccaaaacatctgctcgaacattggcagtcaaggttctgagtgctgttgagcaagatggagcatacagtaatctggagttgaaccgccgtctgaaagaggcggatttaagccccgcagatgctggactagctaccgaattggtgtatggaacaatcgccagaatgaatacacttgattattttctggaacgttacgtcgccaaaggagtatccaaactgcaaccatgggttcgtagcctgctgcgaatcagcgtatatcagatgatatacctggatcgtattccggagcatgccgtggtgagcgaagcggttaatctggcgaagaaactgggccatcagggaatctcgggtatggtgaatggagtgctccgcaatatgatccgcaatcgggatgaacttcgtattccagaacatctacccgttgcagaacgtatttcactggagcattcccacccgttatggatggttgaacgctggattgcccagtacggcgaagagacagcggaagcgatctgtcgagcgaataatgagccgccagcggtgagtgtccgggtcaacacaacaatgaccacacgggagaaactgatgcatgagatgaccagtacaggtgcagtcgttgaagcctctcagctgagttccgatggaattcttgtacgtagtggcggaaacatggctctaacgtcctggtatcgggacgggttgttctctgtacaggacgaaagctccatgcttgtcgctgaagcagttgcgccagaagtagaccaacttgtattggattgctgcgcagctccaggtggtaaaacagctcacatggctgagaaaatgcaggatcgcggtcgtattgtcgcgaatgatgtacatgctcacaagcgccagctgattctggatcaggcggagcgtctcggtctgagctgtatcgatgctgtaactggagatgcgctagacttgaatgaacggtacccggatgcgtcgtttgaccgcattttgctggatgcaccatgttcaggtctgggtgttattcgccgcaagcctgatgtgaaatggaccaaaaccgtaaaagatatcgaagatatcgcaggcttgcaacgtgaattgcttgatcaggttgcgccgttgttaaaaccaggtggtattctggtgtatagcacgtgtacgattgagcctgctgagaatgaggatatggttgcagacttcttgaatcgacatccggaatatagtccagcagaaacatccgtctggtctgaatcggagacagcgaacttgaaggttgtaaacggtggtattcagattttgccacaatacgctcacagcgacggatttttcattgcacggttgacaaaaacagcggaataacagtttaatagagcacggaagtatgaccgccgaggggaacttcggcggatttctttgtgatgggacttcgatataattgtcagagaatgtggtgacagggtgcgatggcggcattgagatgttataatgcatgaagtacagatatcaagggtatacatggatgtaacgtggtctttgtgatagaataggacgaatggaacgaaaagaaggaagccaacgaaaagaaaagaaggaataggtgttgacaacaaaatgaaaccttttatatatgattattctctggaacaactgcagcaatgggctgtggagaatggggagccggcgtttcgcggtggccaaatctttgactggatttatgtaaaacgcgtgaatgatttcagtgaaatgaccaatctgtccaagccattgcgtgaaaaactgacagagcaatttgaatttgtaacgcttaaggaaattaccaagtttgaatccaaagatggaacggttaaattcctctttggtcttcatgatgatcatgccattgagacagtaatcatgaagcataactacgggaacagcatctgtgtaaccacacaggttggttgtcgtattggttgtacgttctgtgcatccacattgggtggtctcaagcgtaaccttacggctggtgagattgttgcccaggttgtgcaagctcagaaaattctggatgaacgcaacgagcgtgtcagcagcattgtaatcatgggttcgggtgaacctttcgaaaactatgaagctacgatgactttcctgcgcattatgattcatgaaaaagggctgaacatcggtcagcgtcacatcacggtatccacgagcggaatcgttccgaacatctacaagtttgcagatgaagatacacagattaacctcgccatttcgatccatgcaccaaatgatgcactgcgttcgaaattgatgccggttaaccgtcgttttccttttgaagacgtgatggagtcccttcgttattatctggccaaaacaggtcggagaattacgttcgagtatgcacttattggtggggtaaacgatcagccagagcatgcagcagaactggcaagtgtgcttaagaacatgttgtgccacgtgaatctgattccggttaaccatgtacctgaacgcaaatacgtaagaacatcgagaagcgacattttcaattttcagaagattctctcggaacagggtgttaatgtaaccattcgtcgtgaacagggacatgatattgctgccgcttgcggtcagcttcgtgcaaagcatatggagttgaggtgagaacgttttgatcaaaacagttcatgtgagccatatcggacgagtgcgttcggtgaatgaagattcagcctggattcgtaatcttgatacaggatatattctgggtattgttgccgatggcatgggtggacatcttgcaggggatacggcaagccgcttggcagtagagacgttggtgaaagatctgggaacactggaaccaggtctgtcacatgcgtctctgtctgcggctctcagcgatgctattttgcatgccaacgaagttatcttccgcacggcatcaacagatgacaagtatcacaacatgggaacaacggtagttgcggctttattgaacgatacggaaggtgttattggacacatcggtgatagcagagcctacaaaattgcgaacaaagctgtgatccagctaaccgaggaccatacactggtgaatgaattgttcaaaaatggtcagattagcaaagaggatgtgtcccatcatccacgtcgcaacgtactaactcgtgcgcttggaacagatgccgaggtgaaggtagatctggataccgtcaagctggaggaaggcgaagttcttctcctgtgcagtgatggtctcagtaacctggtcagcaatgagcagattattcaggttgccggcaatctggaactggcattggaagatcgtgcagaccgactgcttcagttggctttacttgctgggggagacgacaacatcacggttgctttgttcgagttgcagagggaaggttccgtggatacggaaacggggtgtgagtcatgattgggcaccagctaggcggacgctatgaagtgattgagcgtgtcggtggtggcggcatggctcttgtgtacaaagcccaggatcttctgttgaaccggaatgtagcgatcaaagttcttagacaacagtttgtgcatgacgaagagtttattcgccgtttccgcagggaagcacagtcggcagcatcgctgtctcatccgaatgtagtcagcatttatgacgtggggcaggaagatgacgttcattatattgtcatggagtacgtggaaggcaaaaacctgaatgaaattattaaagaacgtgcccctctgcaggtggacgaatcggtgcgaatcgcttcccagattgcagatgctcttgatcatgcacatcataatcaaatcattcatcgggatatcaaaccccacaatatattaattggccggaatggccgtgtgaaagtaacggatttcgggattgcccgtgccgttacatctacaacgattacgcagaccggttccgtagttggttctgtacattacttctcaccagagcatgccaaaggcatcgttactggtgaaaaatcggacttatattctcttgggatcgtactttaccaaatgcttaccgggcaacttccgtttctgggtgaaagtccaatcagtgtggcattgaagcatttgcaggaagagttcgatgaaccacgcaaattcaatccattgattccgcaaagtgtggaaaatgtcatcttaaaatccatgcgtaaaaatccgcaggaacgttatcagtcggctaaagaaatgcagaccgatctggaaacttgcctgatgccggagagacgaaatgaaacgaagattgattttccggatgaggatgatatagaccagactcgcgtaatgccagcgatcaaacctgaaccgcgtggaattacatcgacgggtgcggtgcctgtgatggagtctgacgaagaaactggcaagggtaaagcgaaatcgaagagctggaagaagccagcactactcatctcattaaccgttcttattctaatcgccatggtgggcgttgtatggtatgtcaagggtatgctggttgtacctgaagtaaccgtgcctaacgtaatcacccagacagaagaaaaagctcgggaaatgcttgaggagaaaggactcgtcgtcagtgatgaggtcatccgtctgtaccaggaaggtgtcgaacccggtatcgtctatgaacagagcagaaaagaaggcgatgttgtcaaagaaggttccgaggtccagatcagtgttggtgcggaaaaagaactggtgaagatgattgatgtcaaacaagacccttatgatgaggctgtcaagaagttgactgcgcttggcattaaggaagatcagattcagcggaaagatgacttctccaatgatgtggcttcaggttctgttatttcccagacgccgggtgtgaatgaggaattcgatcctgtgacagttcagattgagttaaccgtaagtaaaggcactgaaacggtcaaaatgcctgatctgaaaaatcatacccgcagtgaagccgaagaaaaacttaaatctgctggacttgtgcttgctcaggtgcaggaagaacaaagttatacggtagaaaagggcaaagtgacgcagcaatggcctgtggaagcgggcgcagatgtgagtcctggcgataagattacgatctttatcagcacagggtatccgcctgaagcgctgcaatatccttttgatatcaatgtatcacccaaagaagagggcaaaaacagtaaaatccgtatcacatatgaagatgcacgtggcaaaaatcaggaatggggaactcgcaccgtgaactcaacccagatcttgaccattccacttgtgctcgctccaaatgaaaatggggctgtgtccgtctatcgtgatggacagttcctggatacgtatcttgtctcctacagtgaagccaaaaacggaacagtaaacgtaccttccattgacccggaacaaagcactgagacgccgccagaaaatgagcctgatccaggtgaaggtagcgtggatgagggaagtgttgattccaatcaggaaggtgaacctgagtccacaccggcagacggtgagggtgagagcgtagatgaggacacttctgccatgaataatggtaaggggcacggcaaggaaaaagagaagaaaaaggaagtcattaacgcatcaagccgtccataagggcggcttatgctggcgtctggagtaaatgtaccaccatctaaaggagggcgtcggagctatgccagaaggtatcatcgttaaagcgctaagcggttactattatgtcatgccagtggaagacaacggggttccttcggttgaaggttccgccgttcaatgtcgagccagaggtatcttcagaaagcggggaacatcaccgcttgtaggtgatcgcgtcagctacatgttgactgagaatggagaaggaacggttgatgaaattcggcagcgtgagacggaacttatccgtcctcctgtagccaatgtaagtttggctgttcttgtgttctctgtgaaggaaccggatatgaacctgaacctgttggacaagttccttgttcacatcgaacaggcggggctggatgcactcattgtgttgaccaaactggatttggctgatccatccaaagacactgttgctgaagtgaaagcattgtatgaacaggttggttatgaggtgatctccacaagttcacgtaccggtgaaggcagtgaattgctcagggaccgtctggctggtaagatcagcgtattctccggacaatccggtgtaggcaagtcttcgatgttaaatgcattgatgccgggcctgacgctggagacaaatgcgatcagcatgcgtctaggacgagggaaacacaccaccaggcacgtggagcttattccgttggataatggtggatttgttgcggatacgccgggattcagccaactggactttctggagatcggtgtggaggaactctccacttgtttccgcgaattcgcccagtttgcagatcagtgcaaattccgaggttgtacccatacacatgaaccaggctgtcgtgtgcttgcggccaaggaggaaggtctgatctccgaaagccgatatcagcactatgtgctgttcctgaccgaaatgaaagataagaagcggaggtattaacatgattaaaattgccccatcgatattatcagctgattttgcccgccttggtgcagaagttgcagaagctcaagctgcaggaggagactggattcatgttgacgttatggacggtcatttcgtccctaatattacgcttggacctgcgattgtgaaggcaatcgctccacatacaagcttgccgctcgatgtgcatttgatgattgagaatccggagcgttatgttgaggaatttgccaaagcgggtgcagcggtaattaccgttcatgctgaggcttgtgtgcatttgcaccgggttattcatctaatcaaggagcaaggagtgaaggcaggagttgcccttaatccaggaacgccagcgtctgccattctcgaagttctggatgatgtggacatggttcttgtcatgacggtaaatcctggctttggcggacaggcattcatctcgggtacgatgaacaaaatcaagcagattcgtacctggttgaacgaaaagggacgccatgatgtacatatcgaagttgatggcgggattgcagccgatacagctccacttgtagtggaagctggagcagatgtgctcgttgccgggagtgccgtatttggccgtgaggatcgtgctgccgcgattactgaaattcgccgtagctacggaggctgatctatgaccctcaaggagacactgtggacgatggctgcgagtctcgtgacgggacttgtgcttgctttgtttgcggttattcaatccccgtttaatgctattacgtcattaatcggggtaggcgttgttattatgtatttccgcaaatttgatcgtacgggacatcgggttacttttgtcatattcggcatactgtattatttactgagtgttttcatgatcgctgcctatcaatatattcctgcccaaacataaatgacctgatcttcgggcttgtcattgtggaatagggatcgaaggttccgcataaatatggttacatgagcaggtttctcatgtagccttttttgtcgtgtttgaggtaaagaaggcctgaagcataggatacggcggacgcatgagcatgatggggagggtgaattatgaaattttacacattcaaactgccgaagtttttgggagggtttgtaaaggcgattcttaatacgtttcaaaagcactgatccgattgataaggtaacagggaataccgccgctgtggctcaggcttatctggaattcgtacctgcgaagcgccatgcggcggccattcacatgttaatgagcgtattcaagaatcccttttttgaataccaaaaaagcacctgcaaggaacaaggtgctttttgcttacccgatttatagtagctttgcgtgattatacgcgagtcactttaccggctttcagtgcacgggtgcttacgtatacacgttttggtttgccgtcaacgagaatgcggaccttctgaacgtttacgccccaagtacgacggttacggttgttagcgtgggatacgtggttaccggtgcccggtttcttacctgtcacataacatttgcgagacatagattacacctcctatcctaaaataaccagttgccttcagaaacgaaaagtcattccataaggactaaattgttcttcctgatcataaagatcaggtttcagtagctaatggcgttgtttaagccggcatgaaccggatcatttccattacttaacctgcataaaacaatacttgaatataatatcataattaaaaaagcttcgtcaactgatccaaaaactttatttatttctcctgtctaatatagtacaatgttgagtagtccataatacagtggtgaacaggctgttgccgcgaggaagtcggagaataaaccgtacttagaggtcggtggtctgcttttttggcaacgctgtgagctgcggcattccatcattggcaccagtctccatgcggcattcatgccggctcttgataccggtgcatatccgtatgccccgaagttaggggtgcagagagtgcaggatattggtagcccggccgcccagaccgttaatccggctgacatgttgtattgtatgcctgtgccggacaaggtatggacgaagaataacgcagtccgcgttagcgcatgaacagaccagacacatcttggtgcaaggtgttcgtgtatcaagctaggaaggggaattctcacttgagtatacgttctttaaatggaacagatttcaccgcaatggtacttgccggagcggaacaacttggacagcatgcagagcacgtcaattccctgaatgttttccctgtgccggatggtgacacgggaacgaacatgaatttgacaatgagtgcaggagtcgcagagattaaaagaaaaagttctgcctccatcggcgaagttgccggtattctatcgaaaggcctgcttatgggcgcacgggggaattcaggagttattctgtcgcaattgttccgtggttttagtcgttcagctgctccctatgaggaactgaatacgctccaatttgcagcagccctgcagaacggcgttgacgcagcttacaaagcagtcgtaaagcccgttgaagggaccattcttaccgtagccaaggaagcggcgaaacatgccaactactacgcaagacggacgaatgatattactgaattaatgaatgaagttttgttaaaagcaaaagaagcactggcaatgactccggaattactgcctgtactgaaacaggttggtgttgtggattcaggtggtcaggggcttgtatatatctacgagggctttatggaagtattgctgcaaagtgacggagggagtcggacttcactgaacaaagaagtaaccccatccgtggcagcatctgctttgaaaccggctgcaccgacagaagtggatatcaagaagcctgcacagcagcaggtgattgcaccggagatgccattgtctgctcaggcgagactggaaacggaagatattgaattcctgtatgatatggaattcttcattaatcgtgagcttggagagaacgcaggagtagcatttgatgacgaagcattccggaaagcgttgtcagttaatggggattcgatcatcatcattgccgacgatgaagtcatcaaagttcatgtccattccaagacaccaggcgatgtattaaacctggcgctgcattatggtgagattacacagattcatattctcaatatgcgtgaacagcatcgggatctcctgacagcaggcatggatattgctccatcacctgaattgtttgcagagattccacctgaggcagcgcgcagtatggaagaggctgtgcttcctgcagatgagatggcaccgtatggttttattgcggtatcctccggtgacggtattgcagagattttccaaagtcttggcgttgatgttgttctgtccggtggacagacaatgaatccgagtactgaggattttgtaaaagccgttcgttccattgctgcggagcaggtatttatactcccgaataactcgaatattgtactggctgcggagcaggctcgtgaattgcttgaagatgagcgccggattacggttattccaagcaagaccattccacagggaatggctgctgcttttgctttccaggaagatgagtctgcggaaacaaaccgtgaccaaatgttggaggccatcagccgggtacagtccggtcaagtgactcatgcggttcgtgatacgcaatatgatgaattggatatcaaggcggggcactatatcggtattcataactccaaaattgtagcgacggatgaaaccatgcttcaagcatgtgaaggtctgctcaaacagatgatggagagtggagatgaagtggtgacgatccttgaaggggaagaagctgaccctgaggttactgctgccctcgctgcatggcttgaagtacagtatcctgatgctgaggtagaggtacatcttggaggacagccggtgtattattatctgttctccgtagagtcctaataaaggttgttcaaaaagtctctagttgactttttgaatatgtacttatagcactctagcgaagaggaggagagtcatgagccacaaggttacgatagtaacagacagtacggcagatattcccgaagaactcattcgcaaatacggaattcatattgttccgctacgtgttctgttcggtgaagagacctatgcagatggcgttgatctgacttcggaacagttctacgaaaagttgaagaaggtatctgtgttgccaacaacttcacagccatctccaaccgatttcatgaatgtgtaccaatcacttcttgatgaaaacccggaacgtccgattgtatcgatccacctgtcatccggcatgagtggtacctatcaatcggccatgcttggcaagtctttgctggagcgtgagggtgacatcaccgtgctggattcgaagtcagcatcttatggatacggtctaatggtggtacaggctgctgaacttgccgaacagggcaagtcagcagtcgaaatcgctgcggctattgaagggatgcaacaatctcgcaagttgttctttcttgtagatactttggagtatctgcaaaagggcggtcggattggcaaagcttcagccatcttgggaacgttgcttaacattaagccgatcctgtctattgatgaagaaggcgttatctacgcagttgagaaagtcagaggtcataaaaaagcaatggcacgcattattgagctgttccagaaggatcttgcaggcaaacgggttaacctggcggtaggtcataccgctgaccctggatcagcgatcgcttgtgcagagcagctacggggtcattttacactgaatgaagtgatctataccaatattggagccgtaataggcagtcatgttggacctggtgtcattgcgatctttatgtggcctgttccggaatgagggattagacatgaaattggaagaaatatcagttaagcaaattaacggcgtgagtgctctcaaagagggagagcttcacgcctttggcatctctactgttaaagacctgcttgaatattatccgttccgttacgaggattatcgtctgcgttcacttagtgaagtgaaggatggggacaagattacggtccagggacaggtgatgggtattcctgtattacaacgatacggtaaaaagtcccgtcttacctgtaagatcatgacggaagagtggatgattacagccacctggttcaatcgccatttcctcaaagaacaactaacccccaatcgggagattgtgattacgggaaaatgggaacaaaaacgcatgcagatgaccgtgactgactcggagttccctgataaaggcgatgggcgttcaggtacattgcaacctgtatattcggtaactggcaaactgacacaacaatggatgcggaaaacgatcaatcagggattaattcaattcggagatatgattcctgagattctgcctcagtccttgatgaggaaatacagcttgatgcctcgtaaacaagcgattgctggaattcatcgtccacaggacaaccgggaaggtcagcaggccagacagcggatggtgtatgaagagctgtttctgttccagttgaaaatgcaggcgtatcgcgcgctcaaccggaatcgcatggatggtgtagtgcataccacggacaatacgacgattcgtgagtttgtacgcagtttaccttttgaactgacagatgctcagaaaaaggtggagcttgaaattctgcatgatatgcgttcgccctatgcaatgaatcggttattgcagggtgatgtcggatcaggtaaaacggttattgcggcaattgcgctatacacaactgttcgatctggattccaaggggctctgatggtgcctacggagattctggcggagcagcatatgcgctcactgcaaaagctgtttgaaccgtttggggtaaccgtagggctgttaacgggcagtgtaaatggacgcaaacgtaaagatctgatcgcctcattgcaaatgggcatgattgatatcgtggtgggtacacacgccctgattcaggaagatgttttcttccgtgatctgggtcttgtggtgacggacgagcagcatcgcttcggggtgaatcagcgcagcgttttacgacgcaaaggatataatccggatgtgttaacgatgacggcaacgcctattccgcggacactggccattacagcttttggggatattgaggtatccacgatctcggaacgtccgaaaggacggattccaatctccacgtattgggtcaagcacgatatgatggagcgggtgctcgggtttatctccagagaagtggatcagggccgtcaggcctatctgatctgtccgctcattgaagagtcggagaaactggatgtgcagaatgccattgatctgcatgtgcagatgcagcagaactttccgaaatatcgtgtaggtctgctgcatggacggatgacggctgcggagaaagaagagatgatgcgggacttctatagcaatgatattcagttgcttgtctccaccactgttgtcgaggttggggtcgatgtgccaaatgccacgttgatggtcattatggacgcggaccgcttcggtctctcccagctgcatcagcttcgtggtcgggtcggtcgtggtgcgcatgcttcctattgtgtactcattgctgatcccaagacggaggttggacaggaacgcatgaaggtcatgacggaaaccgaggatggattcgaggtatctcggcgtgacctggatctccggggtccgggtgatttctttggtaccaaacagagcggactacccgagttccgtcttgccgatatggttgccgattttgctgtgctggaacaggccagagatgacgtgacccacttaattgaggatgcgactttctggacctccatggactatgcacctctgcgtgatttcctacagcaacagcaagtattcaagggtgatctgattgactaaagcttgccttgatagctggtttttcgtattacctttgtaaaaaaagacaagtgtacaagccctcccgacatatgaataagaagtgagttcattcttttgggaggtgctatgcgttttgggttatcaacaatatggaattagtccgcagctggtggagcggatcaaattaaagatgaaaaatcccgctgtcaaagagcgtatcaaaaagttgattgatggcgtgaccaagtctgatttgcaagataaggccaaagtcagaaggttggtcaagtcttcggcagtcattatgaatgagaatttctctccggcgcaggaggagcagtttgttgcgtttgtactcgcgcagaagattgatccaaacaatacgtttcatttgattaagctgtgggggatgtttaggtagggattcgatgtaatgtgggtggaaaaaaacattcgtttacacgagggcactacgatgacagaataaccttccgagcgctgttatccccggattttctgattgaccctttccaagggtaaaatccggtgataaaggcgcacgcttcgcttctttaggttatttctgtcctctccgttgttgtgtaaattgatatattttacaaaacccaaattacattcaagttgtgtggtaatttaggaaggggtgtttcattagtcatgcagatgacgtaatggaacacccctttttgaacggtatggtgccagggagaagactgtcagctaagaaccagaacaacgaaaacaaggaactgggccatcatacatggcctggttccttgttgtttgcggtgaagcatttgtgttgctttcggtattcctctggagtccaaccggtcaattttttaaacacccgaaaaaaatattttggattgtcgtaacccaactgtttggcaacccggtagattttatcgtctgtgctcgttaagagctgcttggcttgtctaatccgtagtcggtttacgtaatcagtgaagttctcggatgtcttttctttaaataaatgactgaggtaactcgggttcaggtagaacagggacgatacccattccagtgttaaatccttggtatagtgattatcgatatatgtcctgacgttgtcgatcacttgatctgatgcgtaggggttgtcttccttaagcagaagagctgttcccgtcagcacctttaccatgtaatgcctaatgcactccatatcgaacgagacgttcaggacggcctccaagctggaagaggcgctactgttacctccgttctggatatagttactcagcagccgtttggtttccgtgataatgtctctgcactgctctttcaggtgggcaagcaaagcgtcaggctggcgtatgtagaaagcaaagaaatcggtgatgagctcttccaccttcggcacattcccgctctctataaaaaataacagttcatatgttcgagcccacttcagttgatgtaaaggaaattgctcccgtgaaaatacgtaacatttgccaaaatcggtaatggctcgttcgtccaacgcaaggatcgtttgatgatgagcttctcggaccccaccaatgcctgtatgaggcaagctgattcccacacaacaatccgtagtttcggatttggtcaaaatgatactcgcagtttgttccgccattttctgcaaatcaagctggcctgagcaatccagatcatgcatcaggaaaaacagtacttgatccgtttgtggatgaggaatgtacaggccattcgaaaaggtaggtagttgctgtgctgtaagcggttgaggaccataaatcgtcaataaaatgaactggtcagatgccatgatggcggcaaattccgcagagcggaacacaggtgttttgatggatgaatggggagccagcacataattcaggaaggtttgcatgtctgcatcccttttcatctgctccgtttctacttctcttagaacgacttcccgctgaagagagcgctcctgttcgatggcttggatggcttggtgaagcgtatcgtggatctcgtcccggctaaaaggcttcagcaggtaatttacaactttcgcagagattgcctcctgcatataatcaaaatcggtatgcccgctaatgacaattaacttgatacgcggatattgctggcatactgtcctgattagcagcttgccgtcgacctcaggcatgcgcatgtccgtaaagataatgtccggcttgaacgattcaatcaaagccaaggcgtctgcgccgttatctgcttcgcctaagagttcaagcgagtgctcaaaagtcccgatttttttcaacaaacctttgcggatcaagggttcatcgtccacaacgatatacgtgtacatctcttggtcacctcttttcccaattggccggaatttcgagtgtaattcgagttcctgtattcaaatcggtatgaaacgaaaggccgtaaccctctccgtaatacaaagcaattcgtgaatgcacgtttttgatgccgatgctttgtttatgcctttgaccaacggcgatgaattcaggtggctgctggagcaattgtcgaagttcctccgcttgtgttgaggacatgcccacgccgtcatcccagatctcgaacacgatgctgtccccctgaaataacccggtaatggtaacggtacccttcccacgtttgttctccaacccgtgatagatggcattttccacgagtggttgcaacagaagtttcagcatgcgacgactccgaatttccgggtctacattcaggttgaacgcgaacttgtcaccataccgaatctgctggatggccatgtagttttctacatgctgaagttcttcgctgaccacaaccagctcgctgtccgttttgatgctgtagcggaacatgtccccgagtgacttggtcatcaccacaatactctcaacttcttcgatctcggcaatgctattaatcgactccagcgtattgtagaggaaatgggagttgatctgtgcttccaatgccttcatctgggagtccagcatgaggattttattctggtaactctctcggatatgtgtatcgatatctttcatcattttgttgaactcgtggtaaaggatgcctatttcatcgacttgccttgttacttgaggcttgatggtcacaaaacgatgagatttggttttgcgcatcagtttggtcaattcgatgatgggtttggtgatcaggttggacaagaaaaaggaaagtagaaggaaaatgacggcacagcttacggccacgtataacagcaacttttgtgagatgttgtactcctcatacaaccgatccatagagatgttggcaatcacgttccaattgcgaccaggaactttctggattaccgtcatcatgttatcttggattgatttgtactgtgaactgtttccgacttgatgcgttgccgcagccagagtatcggagagaggagtgccaactctatttccgtcgctggagtacaggatctcgccagcgtcgttcgccagatatagattggacaagcttggtgccgggttacgttttagaccgtcaaaaatgttcatactgcaatccagcataaacacgcctaggaactcgttgttgttgggatcgtagagggctctggagaagccaatggattccttggcgttaatgatgtaaggtttgacgcctacttcaccaatatacaaatcgcctttacgctggatcgtatccagataccactcatcccgaagtgctacataatcgaggcgtaggtctgtaccgctactgccatagcttatccatttgccatcaggtgtgaaaaggtacaaaccattgatgtaattgtaaccaagcagaatgttttcaaagatcaatttcaatttgctgcggatcatgaagatttcatattgatcgttggtaccgttcaacttgattagttcatcactcacagtgctgtaagcggttgcattggaagactgctgaaggagtgtgacggagatccggtcgatgttctgcaaaatttcctccatgctcttgaccgaattgcctatggttgtcgacgtcacgagagaggtctgctcactcaccagcttcgtgtaactgcgataggaactgacagacacaacgataattggcacgattgatacgaggacgaggaccagaaaaagtttagttttgatgttgaacagaatcatacgtgctcctcccgccatttgtcaattctaaaaatagtgcaccatacgagccaaagcaaatgcacttttgcccaccgtatgatgagaatgtgcacaaagcaagaataaacatgaattgggggaatgacaagatgaaaaaaagaaaacgactgtggtccctaactttggtactgctcttgatgtttctgagcgcatgcagctccagtagcgaggaggggggcggtacggataccaataacgggagtacagatgagtcaggaaagccaattacgttgacgatgatgctttcgggaaacaaggcatccgagggagaggatttcgagctggagaccttgccgcgcctagtcaaagagaagttcccgaacattaacttggaagtacaaaagttgcctgatgatcaatacaatacatctgttcgaaccaagcttgcggctggacagggaccggacattttctggattttcccaaaaaatgcggctggcggtgtcattgattttgcaaaggcaggcttcgctgcggatctgtcagatctgaagttctgggacaacatcagccaaggagcgaaggaagatatgtcctatgagggtaaaccttacggggtggccgaagggttggacttcttgggcgtttactacaataaggagttgttacaacaagcgggatattccgagtttccaaaggattggccttcgtttctggacttatgccaaaagttgcaggcagcgggcgtaacaccaattgcaatgggtgacaaggacccttggatgatccaattcggaatgtatccgattgcagcgaatgtcgtgtatccgaatgagctggattttgatgtcaaattgcagaacggtgaaaaatcgctgactgatccaaagtggattcaaaccatatccaaatacaaagagctctatgataacaactacgtcgtcaaaaactcacttggcattggtagtgcccaatctgcgcagttgtttatcgacgggaaagcagcaatgacctttacgggaacatgggattatgcctccatgacgtccaaaggcgctgccgaatttactcgcggattcgcttcattgccaggtaacgagccggaacagccggtgtttgtatctgctgcaacatctgccggatacgctttgaacgccaaatcggcaaacctggatgcagccaaggaagtactgaactacctgtttgatggtgaatccgatctgttcaaagcatttgtggaagccaacagttccatcagcgtctataaggacgtagaacttgaaaatgaattgtttaaggaagtgaatgacaactatcaacaaactggaaattccatctactttagcaaccagatgtggccagccggagtatcggacgtcatgcaggcaaagtttgccgaaattattgctggacagaaaacaacaccagaagatgtggcaaacgccatggaaaccaagtttagagagctatggaaaaactagaaccaaacgatgctgtctgctgtaaaggggagaatgattgtccttcttcccttgccgcaggccccttggaaaggatggagcaggatgagctctactgtaatgaaaaagtccatgtactggtttgctttgccggcattgatcttctacctgaccttctggatcttcccgatcctgcggttgttccagtacagtataacggattacaacgggtacgcccaagcctataactatatcggtttcgacaactataaggaattgttcaggagcgacatcctaggcatttctttaaaaaatacactgatctatacattcgtcaccgtcatagctggcaatatcatcggtttggcaatggcattgctgttaaacatgaaaataagaggaaccgggatttaccgttccctggcgtatattcccactttgttcagtgcgattgtcgtcggctttttgtggagttacgtctatatgccggattacgggctgatttcttcctttctcgataaactgggtatcgcaaatgaactgaatttcctgggtgattactcgaccgcactgtattctattatcttcgtggaaatatggaagacgatcggaacgacaatgattatcttccttgcaggactacagactgttccaagcgaccttttggaagccggacggattgatggctgcggctcatggagattgctacgacatgtgaagattccattactggcaacagcgattacaatcaacgtgacgttaagtttgatcaatggactcaaagcgttcgacttcccgtttatcatgacaaatggcggtcccggcacggctaccaacacgcttatttataccatatacaagatggcatttaccgaacaactctttggtaaagcttcggctcttggcgttatttcctttgccgtgattatcgtcattaccgctgtttttgtcctgaaaatgaacaaacgggaggtgtcggcatgatgcttcgtaaagttttggggaaagggtccgttcaggtcgttgtgttgttggtgatgacgttaaacctgattccgttaattattgccttttcgacatcactccgagatccaagcaacaacaccaatccgctgatcctgttccgggagatgtcctttgcaagttacaaggctgccttcgaccgcatgcattttccggaagcgctatggaacagcgtggtgttaaccggtgtatcggtcgtgttcgttgtcctgtttgcggcgatggcgtcctacccgatggcccgtttgaagacaaagctaagtaagttcatgtatttgttttttttgtccggactcgtggtacctgcgcaaatggtattgataccgatcgtgcaaatgatcaatgcactgcatattccaacaaatcaatatacgcctattttcatgttcattacgtgcagtctgccgttttcaactttcctgtacacgggcttcattcgaagcggtgtgcctgaggaggtagaagaagcggcgcacatcgacggggcgggattattccaacggttctggaccgtcgtgttccccttactcattccagtaacggtttcggtcattattacgcaaggtgtctggatctggaacgattatttcttcaatatgatctttatttccagcgcaggagattcaccgttaccactggccatgctcggatttttgggtgatcagcaaaatcccacgcagtggaatgtcctgtttgcagcgtgctttctgtgcgcactaccgttgctgctggcgttcttgttcctgcaaaaatattttatcggtggtatgaccgttggagcggtcaaaggttaaggaggacactgcaatgaatgaaaaaatgataaacaacgcctggctggaaaaagcacagcgtctaatgccggagcttcaccagcaaaaggtctatccggaacatatcgtgagcgcagttccggatgcgtcggcttttcagggatggcgtatcgaaccactcggcttagcagaacaactatctgatcaagtgttgtgcaagggagaccgtgttacgctggatttcggggagcatctcgtcggttatctgaccttgtcgcttcttaacgaacgcagtaatgcagatgcacctctcaggttgaagctcacatttggagaaatgccctgtgaggtcggtgagaattttgcagaatattcgggttggcttagccgttcatggcttcaggacgagatcgtgaatatggatgtgttacctggcacgctaacactgaaccgtcgatatgcctttcggtatctgaaaatcgaggtggtagaaacgtcgatccgttacgatattcgaattaacgatatatattgcttgacggtgacttcagcagacataggggcagtacctcaattgcctgaaggtatcgacacggagctgctggaaatagatcgcgtgtccgtgaagacactccgggattgcatgcagacggtatttgaagatggaccgaagcgcgatcgacgtttatggatcggagatcttcgccttcaggccctcgtcaattatgaaacattcggctgtaatgatctcgtcaagcgctgtctctatctctttgccggaacaagattggagggaggccaagtaggagcctgtttgtacgaacaaccggaaccgtacgtggacgacatttacctatatgactatgcgttgttctttattgcgacattatgggactattttgaagctacgaaggacagggaaacgttggaagaactttggccggtggctcgagaacagattgagattgggcttaaacgacttgatgagcggggcatcgtaagggatgacgatacatggtattgttttctagactggcatgaagaattaaataaacaggctggtgcccaggcagtgctcatctatagtatgaaaaggggaaggtcgattgccaaagaactagggctgccggagtatgaggaatggattaacgcacacatcaaagacgctgagcaagcagccctcgcacatctgtgggatggtgaacagggctttttcgtcagtggtgagaaaagacagatatcctgggcatcgcaagtatggatggtactggctgagatcatggatgctccagcggcccggcaattacttgatcggttaatgagtaacgaagaagctattggcatgaccacaccgtacatggttcatcattatgttgatgcattaataatgtgcggggaagaggagaaggcactggagcagatccgaaggtattggggcggtatgctgaaggatggagcggacactttctgggagctctacgacccggacgacaaaacgtattctccttatggtagcaatttggtcaacagttattgccatgcttggagctgcacaccaagttattttatcaggcgaaatttttcgtaattttggacttgaggtcaatcaggtacgtctggttggcctttttggattagtttcaggattgaactatagagccagccatgcctattgtttttatttatctgtttttgttcgtaaagttaaaagaacgagtggctattaatgaagcgataaatacgaatattaaaataaagttatatgggtttcctttaagtatgtagacttgaacgatgagtgtcagagttgagatgcttaagattattcgcaggacaatcgccgatgagcgatcgggaacgattggaataatatgacaactgattataacataggtttttctggagtcggacattttcatagaagttaagggacgaactatggtgtgcttggtgcagtcttgttgatgcattttcacaagatggactttgctttccactggggggagcggtaaactggtgcatacgagctttatggattaatgtcctagatgttctttcaaaaaggcgtggctgtgtcggtatgcattttatttttcaaacagatgtggaggaagtacgattggaaatgtttacgatgctgctgggtttatttgaacgggcggcgctgttgattatatttttattctttctgtcgagggtgccaaggtttaggcagattctgcaaaaggggaaattaaggtggcaggagtctattgcggttaccttgttattctgtgcttttgccattttcgggacatatacgggcattaatgttgaaggttcactggtgaatgtacggatcatcgccgtgttatcgggtggtattttgttcggagcgcctgtgggtattattacgggtattgtctccggggtgcatcggtatttgattgatatggatggagtcacagctataccgtgtctaatcacgagtatcctggcaggtctggtctctggatatatacataagtacacgcccaagcccaagcgatggattatcggtattggtgctggaatgatctgtgaagcgctgacgatgttattaatcctgttattttcctatcctgatccactgggtgccgatattgtttcgaagattgcgctgcctatgattctgggtgaagtcaacattgggctgattgtgctcttggtacagagtgttgaaggggaaaaggaaatgattgcagctcgtcaggcgaagctggcgctggagattgcaaacaaaaccttgccgtatttccgttcgattgatgaggattctctgcgcaaaatttgccggattattcaggaggatattcaggccgatgcggttgcaattacggatacccggaatgtgctggcgtatgtaggatttggtgaagaacgataccatatcggtaatgaaattataagtgagatgaccaagaagacaatatccagcggggagattacgatcagtaatgatgtgattgatgaaaaaacacccgatatccactcgctgttaatcattccgctcaaagaacgaggagacattacaggtgcgctcaaaatctattatcgcaaagcgtacaaaattacgtatccattacaaacgatggctgtaggtctatcgcagatcatctcaacccagatggaagtatcgcgggtagaagagatcaaggctgctgccaacaaagcagagctgcgtgcattacagacaaccattcaccctcattttttgtttaatgcgctaaatgcgattgcatcgtccatccgaactaaaccggatcgtgctcgggagctgattgtgaatctatccgggtacatgcgttacaatctggagctgtcggatgagttaatcgatattcataaggaactggagcaggtccgtaattatgtagagattgagaaagctcgctttggcagccgacttaacgtgatctatgacattgatgaggtcgcggtgcatattccgagtcttgttatccagccgctcgtcgaaaatgcaattattcatggcattctcaaggtcaaaggacccgggactgttcgaattcgtgtacaggattatccggagtttgtgcgaatcagtgtcagtgatacaggggcaggaatcagtgcagatataattgaacgtgtttaccatgaccgtatgcctggtaaccagatcgggctatataatgtgcaccgccgggtcaagcttatctacggacaaggtgtaaccattacacggctggaacaaggaacggatattttatttgatgtgcccaaaggagatgtcgtaacaaggtgatgatggatcaatgagagctcttattgtggaagacgagattttggcaagtgaggaattgaattatttaatccaggaacatagtcagattgaagtggtggatcgccttgaagatgggcttgatgtactgaagtttttgcaggaacaagaagtagatgtcattttccttgatatcaatattccctcgctggacggtatgatgctggcccatcatattgggaagtttgcaacgaaaccctacattgtatttactacagcgtataaggaacatgcagcggaagcctttgagttggaggcgtttgattatattctgaagccgtatgacgagaaacgaattgctgcaatgctccataagctggagctcgcattcaaacgtgatcatgcgccggtggagcaacatgttgaggatggaccagcccctacggcggacggatctgctgcgcatggtgaactggtacgagaacgagatacgaattcccatacggacagaagaattaatctgctgcggaatgacaatattattgttacggatacggcagatatctactatgcggaagcacaagagaaagtgacgaaggtatataccaaaaatggggagttcaccatgccagtgagcatatcggattttcacagccgtctgccacaggatacgttctttcgctgccaccgttcgtacgtcgtaaatctgtcgcaaatccgtgaaattgtaccttggttcaacaatacgtatctgctccgtctgcgcgatttggaagctgaagtgcccgtgagtcgtgggaaggtcaaagaattcaggcaactcatgcgcatctagaagcatttcattccgcatctgatgcaactcatgctcaaaacggtgtgatgaatcccctttcatgtatgattagcttgtgaacgcattcatgtatatgacatcggcaaaggggagatcacgatgaaagcaacaatttcatccgtttcatcaacacctgaatcaacttctgcacctacaaaaatgaaccgctggcttattgttttggggaccatcattgtacaaatgggtcttggaaccatctatacttggagtttatttaatcaaccgttgtctgatcgtttcggatgggacgtcagctcggtcgcgataactttttcaattaccagttttgctttggcttttgccacattgtttgcaggacgattgcaggaacgttggggtcttcagcgtctgatccgtgtagccggggttgtgcttgggctgggtcttattctgagttctcaagtcacctcgttaacactgctgtacattttggctggatttgttgttggttttgcagatggtacggcgtatattacgtcgctgtctaatctgatcaaatggtttccggagcgtaaaggtctgatctcggggatctcggtcggagcctttggtaccggtagtttattgttcaaatatgtgaacacggcattgattggtgccgttggtcctgctcaggcatttatgtactggggcattatcgttctggttctggtcgttgcgggatcattcctgatccgtgaagcggttgttcgtgaacaggctctggcaagcaaggaaggatccaaacaagtcgtagcacgtcatgattacacggtgaaagagatgctgcgtacaaaagaagcgtacatgctgtttgttattttcttcacggcgtgtatgagcggtctgtacctgatcggtattgttaaagatatcggtgtacagcttgcaggtcttgatgtagctaccgctgcaaacgcagtggccatggttgcaatctttaacacggcaggacgtattattctcggtgcgctgtcggataaagtaggacgaatgaaagtcatcgctggtgcgctgctggttacagccgtagctgtcatgacacttagtctggttccactgaccttcgggatcttcttcgcctgtgtggcggccgttgcattctgcttcggtggtaacattacggtattcccggcgattgtggccgattacttcggattgaaaaatcagagcaaaaactatggcgtcatctatcagggatttggatttggtgctttggctggatcattcatcagcgccctgctgggcggattccatctgaccttcatcgtgattgctgtactctgtgctgtctcgctgttgctcgcactgatcatcacccctccaggtgaaggtcgtcgtgctcgtcaacgtgaaaaacagatgaaccttaacccttcatcacgggcaagctaacaacatgcactggaagtacggaactgaggatatttcttcatcttaaaaagcaaattaaaaaacaaagtaaacaaagcggtctccagttgaggccgctttttggtatctacagtgttcagattgctgacttagttggcctatcggaccatctggctgcctgcaagcgtggtgccttgtgtgcattccatcattcgcatctgttatactctaggtgaattcaacaagaccaagacaagttatgtaccccagaggaggcatatcatgaagttcattaaatacacacaacctgattttgatgattattatgcattggtttccaatatggaagtaatgaaacagattacagaacgtgcaataccggagcaagaggcgagaacgcaatttgagtccatgctggagtttaatgagcgttccacttgcggacattaccgagtatatagtgaagatggtgccggtgtggcgtatgccaaattgattccggatcaggaggacccgaccaaggctgagataggttacatgatcctacctgaacattggggcaaaggtcaaggcacatccatagcgtcacggttgattattcaggcacaagccgcagggattggatcactctatgcagttatcgatccgggtaacgctgcttcccggcggatcttgaccagacagaactttgtatccacctggacaggtgattacgatggtcttcccggtgagattttggagttaaatcttcaaatgaagcggtaaaggtactattctgagggtaatcagataatacagggcatcttgcatgagatggctggagctcattatcatcatggtgcatgggttcacccatgtacatttcatgcaagatgcttgcttatatagagatgtggaggagatgacatatgagcaattcaaccatggaacgtctgaatgcattactgccggagtggctggagaccagtcgtttgcacaccgggcaaggtaaggtggcttcttatatcccggagcttgtcaaagcctctcaggatgagctcggtatacatatcatggacgccgaagggaactatgtgtcggcaggggattgcggtgtcccatttacgatgcaaagtatctccaaagtatttacccttattctggccctgatggatcatggggaagaagcggttttctttaatgtaggaaaagaaccgacaggcgacgattacgattcgatgatcaaacttgaattggttgaacccggaatcccatttaatccattaatcaatgcgggtgcgattacggtgtcttctcttgttggaggagattgtaaggaagagaaatcacgccgcattctggagtttttccgcaaactggcgaataatgatcagttgggctataacgaagaggtattccagtccgaatcggagagcggtcatatgaatcgttcacttggctactttttgaagcacaacggggtcattaaggatgacgttgaagacgtgcttgccgtgtatttccgtcattgctccattgaagtgacgtgtgcagatctgtctcgaatgtcactcgttctggcctataatggaacagatccaattacgggagaagaactcatccctcgtcgctatgttcagattgccaaaaccttcatgaccacctgtggtatgtataatgcatcaggcgaatttgccatcgaggtcggcttgcccgccaaaagtggagtatccggagggatattgacccttgtaccgggacaattcggcataggtcttgttggcccggctctgaatcgcaaaggcaacagtattgccggcgtgcatctgctcgagcgtctgtccaaggagttcgactggagctttttctaagaagttttttaaaaaaagaaactataccctcatatgtagccgatgaatcacgtatccgatattttgcttctttagaacgaagtgaatggtctggatatgtctcgtcggctacttttggtattcaccagggagtgtaggaagacagtcctgcatggcaacggcaatgctgcacctatcatggaacatccgcaacatcggggtgggtatatctcccttcagtcatcggctagggccacatctgtaatgaggttcatctgaatatcccgggacccatcttccatcagcagtctgagggtacgagccggacggtccagtcgaagcacttgccccgtgtaacgaatatcatcatgttcgtgaaacaacgtaataatgaccctatctccaagcatcatcgagttgctgagcaaacgggacatttcttccgcggcctgggcatccagagatgggcgggtacgaggagcaagttgttcctgatgaagaatgtaagcttcccggtgttcggggagcatcatgcgtgaggactcgaagataccgttttgctgcaattttttactcatttataatgacctccaattttatgagaacgctcatgggcttgcgcggacgagcagagggaagatgcccgcatgatggcagtatctccgtacctgcgcttgatatcatccgtggcacgttccagttctcttttgcgttcgcggtcatcaaaccaggacagctgcacttcggaatcgggtacaagtccggtcaatgacacgctgatgcggcggatgggtaatccgtcccaatggcgcaggaacagagctgctgccgcatcgtatacttcatccgtaatgttggtgggttcattcaccttcatctggcgggagaaaccggttggccgatcataatcctgtccgcgacatccaaccgagaccacatggcccatgagtgatttgtcacgggaacgtcgactgacgagttccgccagttcaagcagtaccactttgatatcttcccaggagtcatagtcccggggcagcgtcatttgatgtccgatcccctgctgctgatgagcataggtcccgggtttgaccggggaatcgtcaataccacgggcgatacgccacagtacctcgccattcacaccccaacgttctctcagtcgggacagaggggtctgggccagatcaccaatcgtatggacccccattttatagagatgctgcgccatgcgggaacctaccatgaacatgtctcgtacaggcttctgccagatggtggacggcagatctttgcgaggcaacgtgcagatgcctccggggacttttttggcatacagatcgcaggccatcttgctaacgactttggtatcactgatgccgatccgaatgtatacacccgtctcatccatcaccctcgattgaatgctgcgcgcaatcgtctcgggactgccgaacagatccaggcttccggtgacatcgagaaactgttcatcaatactatagggttccaccagatcggtgtaagactgaaggatacgcgtaatatgaagggatacccgaatgtactcggccatccgggggcgaacaacaacaacatctggacatttggcgagcgcttcgcccagtcgttctgctgtcgtaattccataggacttggcgagtggacaggccgcaagaataatacccgaacggcgcgccggatctcccgcgactacgagggggcggtccttgtattcgggatgtgcagacttctccacactggcatagaatgactggcagtctgccagcatgatgacacgtctgtcttggcgaggcataagacttctctccttatccgtgatgctaagctcatctgttaagcatcaatgatcttcatttgaacatcgataattaacagtttatttacagtatggaacaagtgttcttgttttataagcatatctgacaattcgaaatgcggcaaccggaattattttgcaaattggacacaattatgggttagccatattagaggcagaaattaggaaataagatgtgcttttttacatttaatgtgagagatctgtgacctctgggtgatgaccgggcgttcatttaggtttttgtaaaaggtttataaatgggtacagtcctatagagggggactgacgtccttttttggttttctgcatttttcagaaaaccttgatgtgacgcggaatatcgctgatgcgttatcggactatagtatcaattttgtaatctttatggttaatactgtaaaaatgtccgcaactttaacatatgactcgcgtttaatggggtatgtgttcaaacgtaaaacgatgcctgtacccgcgttgcacataacaataaaggttccagaagtgcaagatcagcaggcatctaatccatgcaattcgagcaattattagtgtttgggaatcagaggtatcccagaggcttccgagtggtagttgatggacctttttacgaatcatgggcagaatgttccatttcatgtttgcttccatcagcctagttacaaatacagagtcttagcgctatagtgagaactacaccgctgacatctctaccaagcggacatccgaagcggaatgattcctatgcttcatattggaccattcggtgttgaagcaggatgcataatagagaggtgagcaatctaaagacatgagcagacaaagacgaagacgctggttattaacggtgttgacgggagcagtggtggtgactggcgggatatttgccggatggcactatatgcaacccaagctcgttacgtacacagcggagaacggcacggagatgaaattcaagaccgatggagaccggttcatggaatacgggccggatggaacgtggagggagatgttcgtcaaaggtgtcaacctgggcgcaacttcaccgggacattacccgggagaattcccgctgaccaaagaggattacttgcggtggttccagcagatcgaggatctgggagccaatgtaatccgggtatacacggttcacgaaccaattttctactccgcattagtcgaatataaccgcggccaggagcaaccgttatattttatacagggcatatggtcacctgaagaagagttaattgagaagcaggatgcctatgcggcgcatattgagcagacgttcaagcaggagattgaaaaggccgtatctgctgtctatggcgatgcggacattcctgccaagcagggagagtccagcggcaaatacaagacgaatgctggaaaatatctgatggcctggcatgtgggtacggaatgggacccggcgatggtagacaacacaaacgcaaaacatgcggacgtgccgcagtacaagggagttcatttctcggcgagtccagaagcgtcaccgttcgagaactggctcgcagaactgctggatcatacagcggtcctggagaagaagtatggatgggaacatccgatgactttcaccaactgggtaacgaccgatgtgctggatcatcccggcgagccgctgtatgaagaggatctcgtcagtgtggatgcccgacatattcagccggaggcgtggcagggaggttattttgcagcctaccatgtgtacccgtattacccggatctgttccatatcgataaaacgctccaaaccatcaaggatgagaacggtgagtacaacacgtacaaaagttatctgcgcaagctgaaagccgagttttccgatatgcctgtaatgattacagagtatggcgtaccctcttctcttggtatttcccatctgggtatgggaggacggaatcagggtggacataacgaagtagagcagggagatatcgacgcgtcactgacgcaggatatctatgatgaagggtactcgggagcaattgtgttcatgtggcaggatgaatggttcaaaaaaacatggaacacgatgccactggaaatcccggctgatcgccgtgcatattggctgaacgtactgacaaacgagaagatgtttggtctgcttgccatggaccccggtaaacaggaacagttgaccatcgacggatcactggatgactgggatgatctgaaggttgaagaggtcacgacctggcagggccaagtggacggcattcaggaaatgaagatgactcatgatgaagcctatctgtatattgggctgatcttggatcaaccgtttgacccggagaagacagtgctgcgaattggcacagatacacttgctggaggcagtcagcctgacaagttactctcgggccggacactcagtgatggtcttgaaacagtgattacactggggcaggatgaagaatcacaggtggagattgccaaggattatgactttaatcagcgtctgtacggcaaagaaggatacgatatgctgccagatcagcactcagattccgcagataatccgttccacccatggaatctggcagtcagcctgaggatgacaccgccggatacccgatctgctcaaccgttcatgaatgaaaaggtcggaacattgaagcgaggaacgacggctcccggccaacctgatacggattcattaacgtcatggcagtataacggcaatcaggtggagatgcgaattccctggatgctgcttgggttcggtgatccgagttcgctgcaagcgatcgactatggaccgctcaagaatggacgtgagttctccacagttgctgtggaaggcgttaccctcattccgtggttaacggaccgcgccacgaagaacgtatcctggcctgggggtgaacagacgaccctggatctgaatacattgccggtatatagctggcagccttgggagcaggtgcagtatagtgaacgcctgaagctaagctacgaaaaaatgaagaagagttatgaaaaaaatcctagttttcagatcgaataaatgagtataaaggaggaccttttcacatgtttccaagtttggctttggcctatctgtttttgtacatctgtatcgcacttgttgttgtaggcgtcatcgtattgtttgccatgaaaatgtcccacaatggcaaacgacgtaagacggcattttatgaattgaagcagcgtgactatttcacctatctgcaaacagccttgactgagaatagtccactcagattgccaccaggcaaactggctccgctggaacgcagagtcattcaggacagactgattgaatggatcgaccagttcaagggtgagtatcgcgacaaattaatcgcactgtgccgtgaagcaggattcgtagagcatgatctgaaggaactgggccgtttgcattatggtcgccagattgatgcagcttatcgcttgggtggcatgcgttgtcccgaagccgttccgggtttgatggaattactgaaggatgagaaaccgggcccgatggccattatgattggtcgatccatctccagatgtacgactcggcaaggtgaactgaaagacatgctcgctttgctgttaaccaaaggtaagtccattcaccatctggcagcagatattctgctcgaaacgagtctggatacgagcagaattctaattgaattgctggaggaccggaatcctgattttgtcaaagtcggactggttgccatgtggggacaggctgtacctgaagtgatgcctgcactcgacagactggtaggcgcagaacatcaggatgtacgtgccgaggcggtgaagctgtatcttagcgcaagtccggcactccgggatgagacaatcctgaagctgatccaggaccccgatccggaagttcgcgccgaagtggtacaagcgcttggttacaagcatgcatctggcagcattccattgctgcgcaaagcgcttcgggatgaagactggagagttcgatataacagtgcggagagtctgagcaagctcggtgaaccgggattcgaagcgctgtgtcaggctgcggtgcaaggtacagttgctgagcgcgagattgcgatgcagcagattgagagtaccatgcagcacacgagaaccgatgacagagctgtagagcagatgattgcacataacaaaaaaagactgctgtacgatcgctattttggccctgtacgagagaacagaaccagcaagaagcgcacaggtgtcgctacggtaggaggggattacactgcttagggatctactattaatctacggcatggtcgcaatctactatgttgtttttgtaaatacgctctatttttccattctggccttatcgttccgtaacatctggacgatcttccggcggtcgcattattccaaatacaatacattgtcaggctcggaactggtaccttccgtttctctgctggtaccggcatacaacgaggaactgacgattattgaaaatgtgaactgcctgatgacgctgaattatccaacgtatgaagtcattgtggtgaatgatggctccagtgatgcgacactgaatatcctgttgaaagaatatcgtctgaagccagtacccaatacgaagattcggggcaagatcgcctgtcagaaaattcgtgggatctaccataatccagagttcccggatctgtatgtcattgacaaagaaaacggcggtaaggccgattccctcaatgccgggatcaacctgtcccattatccgttgatctcttccatcgatgctgattcgttgctggagaaagatgccctcatccgcatggcacggatgtatatggagaatccggaagagacggtagccatcggtggagatgtaaggatcgccaatggctgcaaaattgaaaacggggcagtgcaagatgtatcgctgccacgcaagatctggcccatgttccagtcgattgaatatctcaaagccttcttgggcggacggattggctggagtcacatgaacggtctgatcattgtctccggtgccttcggtatgttccgtaaggacgctgttatcgccgtaggtggataccgggatggttatcctggagaagacatgaacatcatcatcaaacttcaccgttacatgctggaaaacaaattgaagtaccgcattgccttctgtcctgaggccgtatgttggacgcaggcaccggattcctaccggatcttgtccagtcagcgtaagcgctggggccgcgggaatctgaagaacatgatcgagaatcgtggcatgttgttcaatccaaaatataaggttatgggtatggtgaccatgccatataacgtcctttttgaagcgctcaacccgtatttccggattaccggacttctggctctcgctggatatgtccttctggatatgacgcaatggcccattctggttctgttcggactgctgaactttgtgagtggttatctgctgagtgtaggcgcacttgtcctagaggagattgctttcaaacgttacaacaaactctccgatctggtcaaaatgctcgtctactccgcgctgaaattcgtgggttaccaccagctcggcgtactgtggagattgcagggacatgtgcagttcatgcaaaacaacaactcatggggtaccatgacacgtcaaagctggtccgaggatgagaagaaaacaagcgaagccgcttgattaaagaataatcaaagcaattatatgtccaactagacatttacacgataacggagagggcagaaaaagcctgaagagcgaagcgtgcgcctaaaagctttccgaaagaaagctgcatcgaaagcatacgcttatccccggatttccccttttataaaggaatcaaaaaatctggggataacagtgatcgaagggctgttctgtcatcgcagtgtcagtgtaaataatattttttggacttatatagataatcgaggagaagggtggaaaagaacatgccaaatacggcgacattgcagcgtgaggctgccgttaatgtgtaccgaagtgtagaacagggattgaaggaaacgggtgccgaaacatgcggcttaatgttcatccattgtgcaggaaactctcaacctgagcagcaggtcaggacacatctggagcaaacgagtgagtctgccttccaggtctggaaggatggggctacccaagcgattgccgtcctgttgccaggtttgtcactggatgaagttcattatgaaggacttcggatcaaacatgagttgcaagagactgtacccggtgccgatccacagattacactggccagtttcccggaaggggagcgcccttcgaaggcaactattcagcatatggctgagtcctcgaagctcgtagattcgtcggaaattcatatctacacgctggacaatacggcggacgagccggaacgaattttgattgtggacaacgatccgacggtacgcgaattcctgcaattgcggttgaagatgcagggatacgaaacctatgaagccgttgatggactggctgcactggagttgatcgagaaagtcacaccagatctggtgctcaccgaactgaatttgtatggcatcgatggtctgccgttcatccatcatattcagaatctggagatggagcagccacccaaaattgtcgtgttgaccgaacagcgtgtcgagcagacgattagtcaatgtttccgcagcggagtcgatgattacatgactaaaccgttctcgcctgtagagctggatgcccgaatcagacgctgcctgcattagaagacggcttgaataagctgattgtgtgaagtgcaaagtaagagctttttttacactatgaatcagatagattagagcaacatttagagcacagacactcatctatttatatggattttaagcaccaccaaatacactgcccggagggaatatcatggagaatcaacaattccacacattactgaatgcgattgaaaataaagaagctgtactcggcgttgtcgggctcggttacgtaggacttccacttgccgtggaaatggtcaatcaaggtttcacggtaatcggaattgatctggatgcgtccaaagtagaaagtatctatcaaggagattcctatattcacgatatttcgtctgatgagttgaaaaaagtaatgcaaagcggtcgtttccagccaacgacagattacagtatgctgcgcgtgatcgacgccctcagtatctgcgtaccgacacctcttagtgagaatcaggacccggatacgtcttacatcgagactgttgtggatcagatcaaactgcacatgaaaccaggcatgctgattacgctggagagcaccacttatccaggtacaaccgaagaactgatccagcagcagctggacaagatcggacaagaagcaggtaaagactatttcctctgcttctcgcctgaacgtgtggacccgtcgaacggacgtttcacaacatttaatacgccgaaagtaatcgggggtacgaccgaagcttgcttgaagctcggaacagcactgtatagcaaatacgtagaaactgtagtaccggtatcttcaccaaaagtggctgagatgtccaaactgctggagaacacattccgcagcgtgaacattgcctttgtaaatgaaatggcgatgatgtgcgaccgtatgggcattgatatctgggaagttattgatgcggcggcgacgaaaccatttggtttcatgccattctatccaggcccaggcatcggtggacactgcattccacttgatccgatgtacctgtcatggaaggccaaaggcttccgtttctatagcaaattcattgagctggcgcaatccaccaatgacaacatgccatattatgtgctaaacaaaacgtcaacgattctgaacgaatacgctaaatccgtacgtaaatccaatattctgctcctcggtatgtcgtataaaccaaatattgccgacctgcgtgaatcaccaggactggaagtatatgaactgttcaaggaaagtggagctaacgttagctactacgatccacatgcggattccttccaggacaaacatggcgagaccgtacacagcgaagcgttcaatctggaacagttcaagaagtacgattgcatcgtgctgatcaccaaccacagcgatttgccttactttgatattgccgagatgggtgtaccgattctggatacacgtaatgcgttccgttcatacacacatccgcatatctacaagattggtcactcggtacagcatcctgtgcttgaaccaagtgaagcgttgctcgtctgaggaaatatatgaggcaacggggcaaactggtgggtatggcgaaatgggccattctggctgtggtgttgtgcctgctgcttctgtcctggatgttcaaatggttctcggcagaggaacacaaagcgacctggctgtgggacgcgtccattattgcagagcagacacctgagattattgctttctccaaagaacagggcgtggataccatcttcctgcaaatccaggatgagttgcctgacgcaacataccgcaaattcattgcggctgcccgacaggctgagattgaagtgcatggacttaacggtcatgcagactgggcctatgaggagaagcgggatgaaggacttgcttttatcgagcgagtacgagcatacaatgcagcttcggccaagaatgaacgcttccaaggtattcaactggatgtggagccgtatcagttgaagcgctgggagaacgaggagagcagcgtcattgcagagtggcagaacaacatgaaggcctggacaaaagccggcgaggctgccggactgtacatgagcgctgccattccgttctggcttgatgcccgtcagtcggctgaaggtgagggtacattcagtcgctgggtgatctcccactttgatgcggtggccattatggcttaccgggatagtgggcagcagatgtatgatctgtccaaggaagaactggacgaagcggatgatctcggcaagaaagtctggatcggagcggaactcgcggatacacacgagggggatcacctgacctttttccgtaaaccggttagcaacatgaatgaagagatggcaaaggtgtttgatctcggtacctctcattcttcttttgcaggtgtggctgtgcatcattatgaagcatggtatgccaaggagaacggtattccgcttgcgcgcaaggatgaaaagaaggaatagcgttaggtcaacgtaaaaaagtttctagtttcaggtagtacgtgtagtcaagactatagtatagaaagaaggcaagtcccgggtagatggggcttgcctttttggtggtggatttcgtaatgggtttggcagcactatgatgtgcaggatatgaaactcaggagtctgttgtactttggtagaggcagcatcttaccacagcacacaaggcgtggtgtatgaggcatggagtataggctgaggagcgaaagtcgctccctcattctttcgtgctctccgctgtgcgatagcgattgggcggcaaaccgacttgctttttgaacgctttagagaaggagaacaagtccgggtaacctacggaatgagccacttcagttaagcttagcggcgtctgcacgagtagacgtttggcttgggtcattttcaattgctggatatattgcacaggggacagaccataggctttgcggaactgtttggcaaaatgggttcgatccacacccgcatgagcggacacaccttccacggagatgccgcttgcaaaatgaatgtccatgtattccttgcctttctggagccaaggtgtagctgaatccggttgcaatcctttggttgcaggggaacgggctatccggtcgaagaggctcagaaatcgggtgagtcgtcccagatcactcgctccatcctgcggtttgcgaacatcctccatgaacgagcgcatggcacttgcagtctccggggtaagtacacctgaacggtaaggtgagtcgggtgtaagtccaattcgggaaagcagttcggctgcatgtgcgccgtcaaaggcaataaatattttctgcaacgtatcctcggggtccgtccaatactcatgggtaacatgtggaaatagacagaacgcatccctggcacaaagggtatgacgctgtccgttctgtatgaatgtaccttccccctccagcacaaatagcaaataatgataaggcgtagtacgcgggccaatatgatagttggtcttggctatattacggccgatgcgaatcggccaggcgccaccagctttctcgaattcagatggagtgaagaaaataatatccaaaaactcatggtggtcctccttcatgctctcggtcatcaggaacacctctttatggtataagtatcgtttgtacattctaaaagtttcgcttacagatgtagttcaaaaagtccacttttgattacgaatcatgcctagtggcatcatcaacatcgaagctgaaattcagccgaaataagcgggagacttacgaagtatgtttcctttggaaacattgtggttgctcacgtagttttcctacgctccgctactccatttctagcttcattccatcttctcggtactgaaaaccagactttttgaacacatgtttaaacctattatacaggtgggttttatacatattcaagatcaggaagacctaaatctgagaaaagaccacaaaatgacaaaataaaattgccgcgaaatgacattgatcacagacaaatcaattgttatgatgtccatacctattaaaccaagttaattaatcggcatttggatatgtgctttgaaaatgaattagaaattaggcacactttaaaaatcaatttcaaccagtgcaaacgtagtggaggggacgaaatcgattctgaagaaacgtagtgttcacctttatctccggatttccccttagaaaaggggatcaaaaaatctggagataacagtgatcgtaagaacgattcgtaaccggaacggccaagttgcagaacagtgatctttttttaacatgagactttatttattcatagaagggattgacttttgtgagcgaacaggaagatatgaagtttggatggtttttgcctacagcaggggatggtaagtatgtaggggttgccccggagcgggaaccgagtctggagtatctggtcgatgtggcacagacggcggaaaaggcaggattcgaatttgtactgattccaacaggtggggcctgtctggatgcgtgggtggtcggctcagctgtgatgagtcacacaaagacattgcgtccccttgtcgccattcgcccgggattggttacacccgtactcgctgcacgaatgggagccgcactggatcagctctctggtggtcgcgccatgatcaatgtggtgacaggcagttctgttcgagatctggaggaactcggcgatccactggcacatgcgcatgatgaacggtatgtacgagcgagcgagtacatggaggtcatgaagcgttcatggacccaatcgacgggactgaatctgacggagtttgcaggaagtggttcaaaatctggcgcagatgcacccagtgatcccaatcctgaattcaacggccagtattataatttcaaaggaccggtaggcatgccggagacggtgcaaaatccgcatccaccattttatctgggaggaagttctccgatagcgaagaaggtcgccgtagaacatgcggatacgttcctcatgtggggtgagcctcatgactggattcaggagcagattgaagagattgaggtcatccgacagcaggtgaaagaggagaccggacaagatcgtcagctccgttacggcatgcgtgctcaggtactcattcgggatacggaggaagaagcatgggcagcagcttgggagattattagcaaagtaccaccagaagcgattgagaaagccaaagccgcttttgcagagacggatgcaaccaaccaacgcagacagaacgagctacgggagctgtccgagaagcaacagtttgtcgtaggtccgaacctgtggacaggcttgtccgttgttcgttccggcggtgcgatcctcattgtaggtacagccgaacaggtcgcagagcgtttgatggaatatggagatctgggcgtgacaaccttcattctgtccggttacccgcatctggaagaggccgaaatcttcggacggaccgtgatgccgatcattcgcgagaaatggaaaacaagacagaagcagcatcaagttactactaactaagtaagtttaactaatctttttatacgaaaacggagaggacagaaataacgtgaagaagcgaagcgttcgcctttatccccggatttttccttttataaaaaggaatcaaataaatctggggataacagcgatcggaaggttattctgtcatcggagtggtcagtataaacattctttagttaaaatatcaagcatcctcaggaggtcgtctttcatgaaaaaaaataaaaaattaatcctgccgcttgtcagtatgctggtgatgtccatcctgctgtcagcttgcggcggcggggataacgcgtcatctggtgagaacggctcctcgggttcaggccaagttacaatcagcttcatgcactggcgtggagaagatgtggaagcactgaacaaaaccattgacgcttttgagacagcaaatccgaacattaaagtggagatgcagacgctgccttccgatcaatatcagtccaccgtacaatccaaaatcagtgacggttcggtaggagatgtatttgcctccttcccgggtgcacagttcgaagctttcactaaagccggcttgttcacggacctgaccggatcatcgtttctgtcggcctacaattccaagctgattgaatcaggacagcacgatggcaagcaatatgcgatcccgtatcaactcgtatataacgatccaatttataatgtaaaactgtttgaacaatacggcctgacgccaccgaccgattgggaaggtttcctggcactttgccagaagctaaaagacaatggcatcattccgattgcctttgccggagcggacattggcccagggcaattcatgaatacgatggtgatgaacaatgcaccaagtgacgacatttttaccaaagtggaagctggcgaagctaaactaacggatgagttctgggtgaaaacgttgactcaaatcaaggaactgaacgataaaggttacttccagcaagatgcactgggcacgaaggaccctgcggctggagcgctgtttattcaagagaaagcagccatgctggcgagcggatcatatcaattggcacagaacaagcagcagaatcctaatctggagcaaaaactgcttgcaccgattacagtaagtgcagatcaagcgaagtatgaaggagtgcatactactacgttcatgctcgcggtgaacagcaagtcaaaacatccggaagaagcgaagaagttcctcgaattccttagcaatcccgatgtagcgagtgactatgccaaccaaacgggacaaaatgtaacggtgaatgatgtgaagtacgatacgcctgagcttcaggtagccggagaatgggcaaccaaaaagaccgtgttccagccacggttcaccatcctgaacggagataatcaaaaagcagtaaccaactccattcaggctgtactgagcggcacttctccggaagaagcagcacagcaggcacaagcgatcattgatcagcatatcgggaaataaacgatgaaaaaccgtcttcagctatccctgtttctgatccccgggttgctgctgtacgttggattgttcgtatttcctacattgacggggctgttctattcctttacggactgggatggggtatccccgtcgtatgcatttgtagggctggataattacaaggacagtctcagcagcatcgtattccgcaaagcctttggcaacaacgtggagttcatgttaacagttgttattgcacaaacctttatatcacttgtcttggcgctgctcctggtacgcaataccaagacacgcattgtgcttcgggcattgtatttcctgcctgcgattctgtcctccgtatcggttggactgatctgggcatttatgtatgatccatctatcggactaatcaactatggactgaatgaagcgggcatgagcagcatcgctcgtaactggattggtgatcccaagatcgccatctattccatcgctgcggtacaagtctgggcccatgccggacagatgatgattgtattcatcgcaggtctgcaaggcatcccggcagaactgtatgaagcggctcgcatggatggcggcagcaaatggcaggtatttcgtaccgtgacctggccactgctggcaccttcggcaacgattgttgtggcctatacgacgattcagtcgttcaaggcatttgacctcattttcacaatgacggacggagggccgaactacgcaactgaaattttgacaacatatatctatcataccgcctttggcagctattcatttggtctggcttctgccggttccatgatcttcctggtgttgctcgcgctcttgacgctgttgcagttcaaggcactgcgtgccgaccgggtaagttattgaggttgatgttggagcattcatcctgcaatcgaggcagaagggagttcacatgtttttaaaatggttcaatcgcctgatcttattggtgtacgcgctgctgattctggtgccgctgtactttgtgtttgtatcctcgttcaaaacaagcagcaatttcttcaccagtccattcagctggccggacccgtttacgtgggataacatcactggcatgttccgcaatcagccgatgtggcaatatttcggaaacagtctggtcgtgacgcttggtacggttgccattgagttattgctgagtagcatgattgcttacgccattgtccgctggggcggcagtgtaggcaaaattgtatttgctctgttcgtagcagggttgatcgttccatcccaggtgagtatgctgccgatctattcccttacgcgtaccctcggctggtcggacagtctcacgggcctgattgtcgtatccgcggctatgctgatgcctgtctcagtatttatgctgacaggtttcatgcgcatgctcaattcggagattctggaagcgggcagtatggatggggccagcgaatggagactctatacgcggattgcactgccactggctgcaccttcgctggcggcaacggctacgttcctgctcgtcatggtatggaatgacttgcttattccgatgctgatgctcagcagtaagtccaagctcactttaccgctcgcacttatgcagttccgcggggaatacgtgacgaactatccgatgatgcttacaggtgtgctggtaacggccattccgatgatcgcgttgttccttctactccagcgttactttgtagcaggtctgacagcgggttcactcaaggggtaaggtatcgcagaaatcggaaggaaaagcttattttgcattgatttctggagcattctgcataataatgatttagtgtcagaatgactacatagagatcaagggagctataagtgatgagcaaactggaagtattgcggaatcccaagcagcgcaagctgctgttcagtgccggcatgagctggctgtttgatgcgatggaagttggtatgatctcctttatcgtggctgcactcgccaaggaatggagtctcagtcccggacaagtcggtgtgcttacgagtattaactccatcggtatggcattaggtgctttgcttgcaggtgcacttgcggaccgttttggacggaaggccattttgatgtggaccttgttaatctttacgattgcaagcggtctgtctgcattggcgactggatttgcggtattgtgtgcactgcgtctggttgcgggtattggacttggtggagagctgcccgtggcatccacactggtatcggagtcgatgcctacagccgaacggggacgtgccgttgtattattggaaagtttctgggcaggaggctggattgtatccgcgctcattgccaactttgtcattccggagtacggatggagaattgcttttgccattggtgcgcttccggcgttctatgcactgtatctgcgtcgtgccattcaggacccgccgcggtacaagaatcataccaagcttcataaaatcacgttccgcgagaaagtagctaccgtctggtcagcaccacatcgccgtacaacgttgatgctctggattttgtggtttaccgtcattttctcttattatggtatgttcctgtggctgccttcggttgtaatggcaaaaggatttacgttggttaaaagtttccaatacgtgctgatcatgacgatcgcacagttgccaggttacttcaccgcggcgtacttcattgaacgttacggtcgcaagttcgtacttgtggtgtatcttactttgactgcattcagtgcgattgcgtttggactggcaacaacggaagcgacaatcctgaccgcggggatctgtctttccttcttcaatctgggagcctggggtggtctgtacgcctacagcccggaattgtatccgacttccgttcgttcgacaggtgttggacttgccacatcggttggccgaatcgggggcgtactggctccattaatggtcggtatgctggttcagcgcgaagtagcgatcagcctaattttcacaattttcttcgtgacaatcctcattggcgcagcagctgtactgttctggggccgggaaacgaagggtcaggaacttgctgagtaattgtcaataaatacaacgcaacttttgtacgggtctgcctgcctacggaaataacgggttggacaagcggtatatggttgatacaagaaggggcatgaccatggtgtgaccatggactcatgcctctttttgttatgttcagcatcggttttttcactgcgtcatcagtccgatagacttcattttttctatatcctataatgacactcgggatgtccaaccgtgaggattcaggagaaagatgtgggatctggattcagaaaagtggaggttaatggaatgatgaagaacaatattggaatggatcaaccgaatgaaatgaatgaaaagaatatgataattgaattagatagcgtgagtgagatgaaagagatgaaggtggttagccatatgaacagtaatgaacgcactacagttgatagcacgaatgaggggttagatctgttaacgattgctgacaacatggagcctatcactgtcagtcggaaagtcactcatgggaaggggaacacggctggcaaaagagcagggcgggtcagtatgcttctcggtgcctgcgcattgactctgggcttgaccgtggcagctccttctgcgggagcacagaagctggaacagggcgttcgtagcgagcatgtgctgcaattgcaggagcaattaagcgatctgggctacttcgatgctggaatgactggatattacggtaccatcaccaaaggtgctgtccgcaagttccagcaggcgcagggactgagtgcagacggcgttgcaggtccagcgacgctgaataggctgaacaaaaaggccaaagccgagggcgagacgctgcgccagttggcgaagctgatccacggtgaagcgcgcggggagtcttttgaagggcaagtcgctgtaggagcggttgtgttgaatcgggtacattcgagtgaattcccgtcgtctatttcgaaggttatttttcagaaagggcaattcacggctatagatgatgggcagtttaataccaagccaacccagacctcttacagagctgctcgcaaggcattgaatggggctgatccgacgaacggagcactgtattattacaatccgaagattgccacttcggtgtggagtaagagcaggccgacactgctgaccattgggcagcatgattttacgagataaagatagtttgagtttatagatagaacaaatgtattttcttaatacaacaaggaaccccggctgtatgctgctcatctgcaggtacatggccggggtttaataattattatatcgtggaaaaatggtatcttaaaattgaagcaaatataagtttaatattacttctggaacgtgaaagggatatttaatgaagtaggctctacaatggtttctccagtgtcatagtcatagattctattgaaaaccaattcaatggattccagctggccggggtcatctgtatatactaaaccatagcccatgttatctatgactacgccgtcatattgatgataaacatagggttttctcataaaattacgatctgctgagataggtttacctgtgtttggatggatggaattcaaaccgtaaaatccgatattttgatccgttgtattttccacactgtagatgattttgatataagttatatcaggaccgatatcttcttgattcagaatagaaatgtttttacgggtatcatctggaatatcactaacctctaataattgagcatccatcatatgaatagttaaaggccctaattcaatactttgcttcagagggacagtttttaacaattttaattgtccgccgtaatcaaatgtacctgtatctccggatttggatagaagtggtggtagtgcgctttccaaaagcttgtcctgaagaattttagcggcctgctcaaattgattatagtctggtttaagtcctttgtatgttagttcagaacggaaaggctttaaaccggattccaagacaagttcagaataagcagggtgaggcagtaacggatttacttccagttgtgtagatgtggtatcattggagctgtctgaaccgcccaaaagtgcgagagcgagcagtagttgaacaataaacataagaagcggcaccctttctcttagaccctattaatataaatgtattttatttataatcataacaaaacagatcatggtgactcatgagaatatcgacccaacttcaggtaatagcatattgacaagttttgatctgatatagtagcaagggcctattccaaataagcgggttcaatcagtttgttaaaatttaggatcattagaatataaattaaagtcagggtgagtaaaatgaagttgctaaagatctcattagttataattgcactagttgtcatcgcttctttatcatggtatggctcttataagagtgacatgaagaagctggaggatgatttgagaacatatttaaccgccgaaaaaggaatagatgggaatacgattataagcatcaccgctcgtcgaagcaaaatgccgatgtatcctgttgtcgtcaaattcaaggacaatccgcaggaatatatctacaactttacagatgaatggattcagctgacgcctaatccgaatgaataaagcaatcatacttactaagacaaaagaagatattatgcttcaccattggattcgcctgtccaatcctggaaaatggataacgataaaaaaaacggtagattaaggatggattaacacgatgagaattatcatagtaccagctaaaaagatgaagatcgacaccgatcttatggctatcgcgcagatgccgcaatttataaattacttatattcaaacacgaaaaatacctcagcagatcaaagattggctaactaaaaaagggattggattcaagggatttttagattaaagataagggggattttgcatgtctgtttcaatatccattgaaataagtttatcaaagcaaatctcaagaatgactattcttcgcaaactcgaagatttcggttggtcttataacgatcaaggaaaagtaacttatctaccaattggagacgataattactttaattggcggagaaaatcaattcctctagaggagttactaaagattttagtcataaaggataataaaagagaattaattggagtggcaatgacttggaaagatactgatgtagggggaacatttttaattgaagagaatggtaccatacttatgagtcctgatatcaatcgaaaagtccttgatgtagaaagttataacaaaataactgacgtaaattggtatgcaactaaactaatacctgtatttggtcaattatttgagtctatttcttataatgaacatgtataatttcctacgcttaaaccttggggcaatgtccttaaggttttttctttttggccgatagaatagaagtttctaaaaggatcactgattgtacttatattagttgtcatagcttcagtcacatggtacggctcttataagaatgatatgaagaaacttgaagaaggtttaagaacgtatttaatcgttgaaaagggtatggataaacatgatatcattagcttcaccgctcgtcgaagtaaaatgccacagtatcctgtagtcgtcaaattaaaggacaatccacaggaagttgtatacacccagagagaagagcaatgggtgcaactatggcctaatccataattgccagatgaattattgatcactttcttttatcggaataagcgggtataggacgtcactgactcaccattttcttcactacttaacctaatagtacttcaagcgatgaatatccttgaaacctaataccattttacaaagtatatataaaagaggatataattagttgccatttataaatttgtactcggttacatccatagaggggaggacggatattccatttattgggggaatcattttaatttttatcctagcatttattctatggtcattaatgttcccgctattcaataaaataggtagtag
